(19) United States
(12) Patent Application Publication
(10) Pub. No.: US 2026/0209310 A1
(43) Pub. Date: Jul. 23, 2026

(54) COMPOSITION AND USE THEREOF FOR THE TREATMENT OF HEREDITARY DISEASES

(71) Applicant: QUIDDITAS SA, Liège (Sart-Tilman) (BE)

(72) Inventors: François CHERBONNEAU, Marche-en-Famenne (BE); Aurore CHERBONNEAU PRUNEVIEILLE, Marche-en-Famenne (BE)

(73) Assignee: QUIDDITAS SA, Liège (Sart-Tilman) (BE)

(21) Appl. No.: 19/143,616

(22) PCT Filed: Dec. 28, 2023
(86) PCT No.: PCT/EP2023/087872

§ 371 Date: Jun. 26, 2025

(30) Foreign Application Priority Data
Dec. 28, 2022 (BE) 20226100

(51) Int. Cl. C07K 14/715; C12N 5/0789; C12N 15/11; C12N 15/85; C12N 15/90

(52) U.S. Cl. CPC C07K 14/7155; C12N 5/0647; C12N 15/111; C12N 15/85; C12N 15/907; C12N 2510/00; C12N 2800/90

(57) ABSTRACT

A composition having a first single-stranded nucleic acid molecule with a region complementary to a target and transposase recognition sites, a second single-stranded nucleic acid molecule with a region complementary to a target and transposase recognition sites, and a third single-stranded molecule having a sequence coding for a portion of the interleukin 2 gamma receptor (IL2-Rγ), or coding for the complete IL2-Rγ receptor and transposase binding sites. Also, the use of this composition to replace the IL2Rγ gene in treating hereditary diseases, such as X-linked Severe Combined Immunodeficiency (SCID-X) caused by mutations in the IL2Rγ gene.

### FIELD

[0001] The invention relates to a composition and the use thereof for the treatment of hereditary diseases.

### BACKGROUND

[0002] X-linked Severe Combined Immune Deficiency (SCID-X) is caused by mutations in the IL2Rγ gene, which induce immune system dysfunction leading to severe infections, fevers, and rashes.

[0003] The gamma subunit of the interleukin-2 receptor (IL2-Rγ), regulated by the IL2-Rγ gene, is common to many interleukin receptors (IL-2, IL-4, IL-7, IL-9, IL-15) and is present on the surface of hematopoietic stem cells. This protein, in association with others, is essential for lymphocyte formation. Thus, the mutation of the IL2Rγ gene causing a blockage in production of the IL2-Rγ receptor will thereby also block cell differentiation into lymphocytes, mainly T and Natural Killer (NK) lymphocytes. Similarly, the absence of T and NK lymphocytes in the body leads to inactivation of the B lymphocytes formed.

[0004] The IL2Rγ gene is located on the X chromosome. Males with only one copy of this chromosome, and therefore of the IL2Rγ gene, are automatically affected by the disease if the gene is mutated. On the other hand, females with 2 copies of the gene are said to be “healthy carriers” and will only show symptoms of the disease in extremely rare cases.

[0005] Symptoms of SCID-X generally appear between 3 and 6 months of age. Most affected children suffer from stunted growth, oral and genital rashes, and multiple persistent infections leading to death within 1 or 2 years if left untreated.

[0006] The prevalence of SCID-X is very difficult to assess due to a lack of diagnosis, but has been estimated at around 1 in 50,000 births.

[0007] The gold standard treatment is immune reconstitution via bone marrow transplantation. The success rate of this approach is directly linked to the level of compatibility between the marrow donor and the sick child. If compatibility is high (usually marrow from the patient's brother or sister), total remission will be achieved in 20% of cases. However, in 80% of cases, the patient will develop variably intense symptoms of GVHD (Graft Versus Host Disease), meaning that the immune cells of the transplanted marrow will attack the patient.

[0008] The alternative treatment is gene therapy based on the use of viruses (lentivirus or AAV), where the IL2Rγ gene is reintroduced into a sample taken from the patient's hematopoietic stem cells and then reinjected to repopulate the immune system. This approach, still in clinical trials, claims to be effective in 80% of cases, but requires several sessions of extremely costly treatment, and in 20% of cases leads to the development of leukemia due to the fact that this viral approach is not targeted and does not bring the new IL2Rγ gene to its original locus.

[0009] Patent application US20150152436A1 describes new therapeutic developments aimed at adapting the CRISPR/CAS9 genome-editing approach to the treatment of SCID-X. However, the polymorphism associated with this pathology, as well as the possible insertion of the IL2Rγ cDNA by more than 600 base pairs, remains a significant technical obstacle to clinical use.

[0010] The need to provide effective treatment therefore remains.

[0011] One of the aims of the invention is to overcome the drawbacks of the prior art.

[0012] One aim of the invention is to propose a composition capable of enabling the replacement of the IL2Rγ gene in an efficient and complete manner.

[0013] A further aim of the invention is to provide a method or drug capable of treating pathologies linked to the deficiency of said gene.

### SUMMARY

[0014] The invention relates to a composition comprising:
[0015] a first single-stranded nucleic acid molecule comprising or consisting essentially of an A sequence allowing the insertion of a complementary sequence of a nucleic acid of interest, or comprising a complementary sequence of a nucleic acid of interest, said complementary sequence binding at 5′ to a first T-rich sequence of 40 to 60 nucleotides in length and at 3′ to a second T-rich sequence of 40 to 60 nucleotides in length, said first and second T-rich sequences respectively comprising a first and a second domain of 6 to 12 G/C-rich nucleotides, the sequence of the first domain being complementary to the sequence of the second domain, said first and second domains being positioned 15 to 52 nucleotides from said A sequence, said first molecule comprising at its 5′ end at least one first sequence oriented 5′-to-3′ for recognizing a transposase and at its 3′ end a second sequence for recognizing said transposase,
[0016] a second single-stranded nucleic acid molecule comprising or consisting essentially of a B sequence allowing the insertion of a complementary sequence of a nucleic acid of interest, or comprising a complementary sequence of a nucleic acid of interest, said complementary B sequence binding at 5′ to a third T-rich sequence of 40 to 60 nucleotides in length and at 3′ to a fourth T-rich sequence of 40 to 60 nucleotides in length, said third and fourth T-rich sequences respectively comprising a third and a fourth domain of 6 to 12 G/C-rich nucleotides, the sequence of the third domain being complementary to the sequence of the fourth domain, said third and fourth domains being positioned 15 to 52 nucleotides from said B sequence, said second molecule comprising at its 5′ end at least one first sequence oriented 5′-to-3′ for recognizing said transposase and at its 3′ end the second sequence for recognizing said transposase,

[0017] said B sequence being a complementary sequence of said nucleic acid of interest, the A sequence being positioned at 5′ of a region of interest of said nucleic acid of interest and the B sequence positioned at 3′ of the region of interest of said nucleic acid of interest, and
[0018] a third single-stranded molecule comprising
[0019] in its 5′ part, at least one complementary sequence of said second sequence for recognizing said transposase of the first molecule,
[0020] in its 3′ part, at least one complementary sequence of said first sequence for recognizing said transposase of the second molecule, and
[0021] an intermediate region located between the complementary sequence of said second recognition sequence of said transposase of the first molecule and the complementary sequence of said first recognition sequence of said transposase of the second molecule, said intermediate region comprising a sequence coding for a portion of the interleukin-2 receptor gamma or IL2-Rγ, or coding for the complete IL2-Rγ receptor,

[0022] the first and third single-stranded nucleic acid molecules being paired according to the base complementarity defined by Watson and Crick so as to define two double-stranded binding sites of said transposase, and the second and third single-stranded nucleic acid molecules being paired according to the base complementarity defined by Watson and Crick so as to define two double-stranded binding sites of said transposase.

[0023] The invention is based on the inventors' observation that the use of a complex molecule as described above, involving a bacterial transposase, enables targeted and effective replacement of the IL2Rγ gene, which codes for IL2-Rγ.

[0024] This means that the invention relates to a molecular complex comprising a first single-stranded nucleic acid molecule, a second single-stranded nucleic acid molecule, and a third single-stranded nucleic acid molecule, said third single-stranded nucleic acid molecule comprising or consisting essentially at its 5′ end of at least one complementary sequence of said first recognition sequence of said transposase, and said third single-stranded nucleic acid molecule comprising or consisting essentially at its 3′ end of at least one sequence complementary to said second recognition sequence of said transposase,
[0025] said complex being such that the first, second and third single-stranded nucleic acid molecules are paired according to the base complementarity defined by Watson and Crick so as to define two double-stranded binding sites for said transposase in the 5′ end of the third molecule and two double-stranded binding sites for said transposase in the 3′ end of the third molecule.

[0026] The invention is based on the unexpected observation made by the inventor that the use of specific single-stranded guides capable of targeting a region of a nucleic acid of interest makes it possible to mobilize transposases in a controlled and “site-specific” manner, and thus to use the recombination properties of said transposases to replace sequences in molecules of interest.

[0027] The aforementioned molecular complex is in fact the basic unit of the technology defined in the invention. This basic unit is useful for guiding the recombinases to a specific site where the recombination, and therefore the sequence replacement, must take place. Unlike the CRISPR/Cas9 system, which requires the presence of PAM-type (NGG) sequences, the molecular tool defined herein may be used on any target sequence, regardless of its sequence.

[0028] The aforementioned molecular complex is therefore the basic unit to be completed by:
[0029] a homology region of a 5′ region of the target sequence, said homology region being represented by A sequence and
[0030] a homology region of a 3′ region of the target sequence, said homology region being represented by B sequence.

[0031] This is therefore an intermediate product of the tool as described hereinafter.

[0032] The molecular complex consists of three single-stranded nucleic acid molecules, which may be DNA molecules, RNA molecules or mixed RNA and DNA molecules.

[0033] These three molecules are partially complementary with one another in pairs, according to the base complementarity of nucleic acids defined by Watson and Crick, that is to say that adenine pairs with thymidine or uracil, and cytosine pairs with guanine, and vice versa.

[0034] More particularly, the three molecules forming the aforementioned complex each comprise the sequence of one of the strands of a double-stranded molecule corresponding to the binding sequence of a transposase. Also, each single-stranded molecule therefore comprises a transposase binding “half sequence” and therefore cannot allow an interaction with said corresponding transposase. On the other hand, when the three molecules of the complex interact together, by base pairing as defined hereinbefore, a double-stranded molecule is thus formed, reconstituting a double-stranded binding site of said transposase, the latter thus being able to interact with the molecule formed.

### BRIEF DESCRIPTION OF THE FIGURES

[0035] The invention will be better understood from reading the following examples and figures:

[0036] FIG. 1A is a first schematic representation of a first form of pairing of the first, second and third molecules of the composition according to the invention.

[0037] FIG. 1B is a second schematic representation of a first form of pairing of the first, second and third molecules of the composition according to the invention.

[0038] FIG. 1C is a third schematic representation of a first form of pairing of the first, second and third molecules of the composition according to the invention.

[0039] FIG. 1D is a fourth schematic representation of a first form of pairing of the first, second and third molecules of the composition according to the invention.

[0040] FIG. 1E is a fifth schematic representation of a first form of pairing of the first, second and third molecules of the composition according to the invention.

[0041] FIGS. 2A-2C are diagrams showing the principle and steps involved in single-stranded replacement using the first, second and third molecules of the composition according to the invention.

[0042] FIG. 3A-3C are diagrams showing the principle and steps involved in double-stranded replacement using the first, second, third, fourth, fifth, and sixth molecules of the composition according to the invention.

[0043] FIG. 4 is a diagram showing the combination of molecules contained in tube 1 of example 1. The black ball represents biotin.

[0044] FIG. 5 is a diagram showing the combination of molecules contained in tube 2 of example 1. The black ball represents biotin.

### DETAILED DESCRIPTION

### The Complex

[0045] In addition to the detailed definition of each of the first, second and third molecules, each described below, the complex according to the invention is such that it comprises two pairs of binding sites to one or more transposases,
[0046] a first pair of binding sites to a first transposase as a result of pairing according to the base complementarity of nucleic acids defined by Watson and Crick between the first single-stranded nucleic acid molecule and the third nucleic acid molecule, and
[0047] a second pair of binding sites to a second transposase as a result of pairing according to the base complementarity of nucleic acids defined by Watson and Crick between the second single-stranded nucleic acid molecule and the third nucleic acid molecule.

[0048] the first and second transposases may be the same or different.

[0049] Each transposase-binding site consists of two double-stranded patterns, a first double-stranded pattern composed of a first transposase-binding half-site and a complementary sequence, according to the base complementarity defined by Watson and Crick, of said first transposase-binding half-site, and a second double-stranded pattern composed of a second transposase-binding half-site and a complementary sequence, according to the base complementarity defined by Watson and Crick, of said second transposase-binding half-site.

[0050] In the invention, the complementary sequence of a transposase-binding half-site is referred to as a complementary half-site of said site.

[0051] A transposase binding site therefore consists of four half-sites:
[0052] a first transposase-binding half-site with a first sequence,
[0053] a second transposase-binding half-site with a second sequence,
[0054] a third half-site with a sequence complementary to the sequence of the first half-site, according to the base complementarity defined by Watson and Crick, and
[0055] a fourth half-site with a sequence complementary to the sequence of the second half-site, according to the base complementarity defined by Watson and Crick.

[0056] Thus, in the complex there will be 8 binding sites, four of them constituting the first pair of binding sites by pairing the first and third nucleic acid molecules, and the other four constituting the second pair of binding sites by pairing the second and third nucleic acid molecules.

[0057] Note that for the first pair of transposase binding sites, the four half-binding sites are such that
[0058] the first half-site and the second half-site are contained in the first nucleic acid sequence,
[0059] the complementary site of the second half-site is comprised in the third nucleic acid sequence,

[0060] their positions in the complex are therefore defined, and
[0061] the complementary site of the first half-site is either i) comprised in the first nucleic acid molecule, ii) or comprised in the third nucleic acid molecule

[0062] it is therefore not necessary to define its position in one (first) or the other (third) nucleic acid molecule, the essential point being that when the first and third nucleic acid molecules are paired according to the base complementarity defined by Watson and Crick, the two half-sites are reconstituted, that is, the first half-site is paired with the half-site complementary to the first half-site, and the second half-site is paired with the half-site complementary to the second half-site.

[0063] Note also that for the second pair of transposase binding sites, the four half-binding sites are such that
[0064] the first half-site and the second half-site are contained in the second nucleic acid sequence,
[0065] the complementary site of the first half-site is comprised in the third nucleic acid sequence, their positions in the complex are therefore defined, and
[0066] the complementary site of the second half-site is either i) comprised in the second nucleic acid molecule, ii) or comprised in the third nucleic acid molecule

[0067] it is therefore not necessary to define its position in one (second) or the other (third) nucleic acid molecule, the essential point being that when the second and third nucleic acid molecules are paired according to the base complementarity defined by Watson and Crick, the two half-sites are reconstituted, that is, the first half-site is paired with the half-site complementary to the first half-site, and the second half-site is paired with the half-site complementary to the second half-site.

### The First Molecule.

[0068] The first molecule of the complex is the molecule that comprises, once modified, a nucleic acid sequence that makes it possible to specifically target a region of interest of a nucleic acid molecule of interest. This sequence of interest is selected by the user of the system according to the selected target. This sequence of interest is inserted into the first molecule of said complex at the A region. This A region corresponds at least to two nucleic acids between which the sequence that makes it possible to target the target molecule is inserted. In view of the oriented structure of the nucleic acids (5′-to-3′ direction), it is important for the sequence that makes it possible to target the region of interest to be positioned in the correct direction, in order to allow pairing with the target sequence.

[0069] Also, advantageously, the A region comprises one or more sites recognizing restriction enzymes in order to promote an oriented insertion. One or more of the following sites may be present in the A region:

TABLE 1

| | | | |
|---|---|---|---|
| | | AA/CGTT | AclI |
| | | A/AGCTT | HindIII |
| | | AAT/ATT | SspI |
| | | /AATT | MluCI |
| | | A/CATGT | PciI |
| | | A/CCGGT | AgeI |
| | | ACCTGC(4/8) | BfuAI |
| | | | BspMI |
| | | A/CCWGGT | SexAI |
| | | A/CGCGT | MluI |
| | | ACGGC(12/14) | BceAI |
| | | A/CGT | HpyCH4IV |
| | | ACN/GT | HpyCH4III |
| SEQ ID NO: | 4 | (10/15)ACNNNNGTAYC(12/7) | BaeI |
| SEQ ID NO: | 5 | (9/12)ACNNNNNCTCC(10/7) | BsaXI |
| | | A/CRYGT | AflIII |
| | | A/CTAGT | SpeI |
| | | ACTGG(1/−1) | BsrI |
| | | ACTGGG(5/4) | BmrI |
| | | A/GATCT | BglII |
| | | AGC/GCT | AfeI |
| | | AG/CT | AluI |
| | | AGG/CCT | StuI |
| | | AGT/ACT | ScaI- |
| | | AT/CGAT | ClaI BspDI |
| SEQ ID NO: | 6 | ATCTATGTCGGGTGCGGAGAAAGAGG | PI-SceI |
| | | TAAT(−15/−19) | |
| | | ATGCA/T | NsiI |
| | | AT/TAAT | AseI |
| | | ATTT/AAAT | SwaI |
| SEQ ID NO: | 7 | (11/13)CAANNNNNGTGG(12/10) | CspCI |
| | | C/AATTG | MfeI |
| | | CACCTGC(4/8) | PaqCI |
| | | CACGAG | Nb.BssSI |
| | | CACGAG(−5/−1) | BssSI-v2 |
| | | CACGTC(−3/−3) | BmgBI |
| | | CAC/GTG | PmlI |
| | | CACNNN/GTG | DralII |
| SEQ ID NO: | 8 | CACNN/NNGTG | AleI-v2 |
| | | CAGCAG(25/27) | EcoP151 |
| | | CAG/CTG | PvuII |
| | | CAGNNN/CTG | AlwNI |
| | | CAGTG(2/0) | BtsIMutI |
| | | CA/TATG | NdeI |
| | | CATG/ | NlalII |
| | | /CATG | FatI |
| | | C/ATG | CviAIII |
| SEQ ID NO: | 9 | CAYNN/NNRTG | MslI |
| | | CC(12/16) | FspEI |
| SEQ ID NO: | 10 | CCANNNNN/NNNNTGG | XcmI |
| SEQ ID NO: | 11 | CCANNNNN/NTGG | BstXI |
| SEQ ID NO: | 12 | CCANNNN/NTGG | PfIMI |
| | | CCATC(4/5) | BccI |
| | | C/CATGG | NcoI |
| | | CCCAGC(−5/−1) | BseYI |
| | | CCCGC(4/6) | FauI |
| | | CCC/GGG | SmaI |
| | | C/CCGGG(0/−1)CCD | TspMI XmaI |
| | | | Nt.CviPII |
| | | CCDG(10/14) | LpnPI |
| | | CCGC(−3/−1) | AciI |
| | | CCGC/GG | SaclI |
| | | CCGCTC(−3/−3) | BsrBI |
| | | C/CGG | MspI HpalI |
| | | CC/NGG | ScrFI |
| | | /CCNGG | StyD4I |
| | | C/CNNGG | BsaJI |
| SEQ ID NO: | 13 | CCNNNNN/NNGG | BslI |
| | | C/CRYGG | BtgI |
| | | CC/SGG | NciI |
| | | C/CTAGG | AvriI |
| | | CCTC(7/6) | MnlI |
| | | CCTCAGC | Nb.BbvCI |
| | | CCTCAGC(−5/−7) | Nt. BbvCI |
| | | CCTCAGC(−5/−2) | BbvCI |
| | | CCTGCA/GG | SbfI |
| | | CCTNAGC(−5/−2) | Bpu10I |
| | | CC/TNAGG | Bsu36I |
| SEQ ID NO: | 14 | CCTNN/NNNAGG | EcoNI |
| | | CCTTC(6/5) | HpyAV |
| | | /CCWGG | PspGI |
| | | CC/WGG | BstNI |
| | | C/CWWGG | StyI |
| SEQ ID NO: | 15 | (10/12)CGANNNNNNTGC(12/10) | BcgI |
| | | CGAT/CG | PvuI |
| | | CG/CG | BstUI |
| | | C/GGCCG | EagI |
| | | CG/GWCCG | RsrlI |
| | | CGRY/CG | BsiEI |
| | | C/GTACG | BsiWI |
| | | CGTCTC | BsmBI-v2 |
| | | CGTCTC(1/5) | Esp3I |
| | | CGWCG/ | Hpy99I |
| | | CMG/CKG | MspA1I |
| SEQ ID NO: | 16 | CNNNNNNNNNNN/NNNNNNNNNG | AbaSI |
| | | CNNR(9/13) | MspJI |
| | | CR/CCGGYG | SgrI |
| | | C/TAG | BfaI |
| | | CTCAG(9/7) | BspCNI |
| | | C/TCGAG | XhoI PaeR7I |
| | | CTCTTC(1/4) | EarI |
| | | CTGAAG(16/14) | AcuI |
| | | CTGCA/G | PstI |
| | | CTGGAG(16/14) | BpmI |
| | | C/TNAG | DdeI |
| | | C/TRYAG | SfcI |
| | | C/TTAAG | AflII |
| | | CTTGAG(16/14) | BpuEI |
| | | C/TYRAG | SmlI |
| | | C/YCGRG | BsoBI AvaI |
| | | GAAGA(8/7) | MbolI |
| | | GAAGAC(2/6) | BbsI |
| SEQ ID NO: | 17 | GAANN/NNTTC | XmnI |
| | | GAATGC(1/−1) | BsmI |
| | | GAATGC | Nb.BsmI |
| | | G/AATTC | EcoRI |
| | | GACGC(5/10) | HgaI |
| | | GACGT/C | AatlI |
| | | GAC/GTC | ZraI |
| | | GACN/NNGTC | PfIFI Tth111I |
| SEQ ID NO: | 18 | GACNN/NNGTC | PshAI |
| SEQ ID NO: | 19 | GACNNN/NNGTC | AhdI |
| SEQ ID NO: | 20 | GACNNNN/NNGTC | DrdI |
| | | GAG/CTC | Eco53kI |
| | | GAGCT/C | SacI |
| | | GAGGAG(10/8) | BseRI |
| | | GAGTC(4/-5) | Nt. BstNBI |
| | | GAGTC(4/5) | PleI |
| | | GAGTC(5/5) | MlyI |
| | | G/ANTC | HinfI |
| | | GAT/ATC | EcoRV |
| | | GA/TC | DpnI |
| | | /GATC | Sau3A−DpnII |
| | | | MboI |
| SEQ ID NO: | 21 | GATNN/NNATC | BsaBI |
| | | G/AWTC | TfiI |
| | | GCAATG | Nb.BsrDI |
| | | GCAATG(2/0) | BsrDI |
| | | GCAGC(8/12) | BbvI |
| | | GCAGTG(2/0) | BtsI-v2 |
| | | GCAGTG | Nb.BtsI |
| SEQ ID NO: | 22 | GCANNNN/NTGC | BstAPI |
| | | GCATC(5/9) | SfaNI |
| | | GCATG/C | SphI |
| | | GCCC/GGGC | SrfI |
| | | GCCGAG(21/19) | NmeAlII |
| | | G/CCGGC | NgoMIV |
| | | GCC/GGC | NaeI |
| SEQ ID NO: | 23 | GCCNNNN/NGGC | BglI |
| | | GCGAT/CGC AsiSI | |
| | | GCGATG(10/14) | BtgZI |
| | | GCG/C | HhaI |
| | | G/CGC | HinP1I |
| | | G/CGCGC | BssHII |
| | | GC/GGCCGC | NotI |
| | | GC/NGC | Fnu4HI |
| | | GCN/NGC | Cac8I |
| SEQ ID NO: | 24 | GCNNNNN/NNGC | MwoI |
| | | G/CTAGC | NheI |
| | | GCTAG/C | BmtI |
| | | GCTCTTC(1/-7) | Nt. BspQI |
| | | GCTCTTC(1/4) | Sapl BspQI |
| | | GC/TNAGC | BlpI |
| | | G/CWGC | ApeKI TseI |
| | | GDGCH/C | Bsp1286I |
| | | GGATC(4/5) | AlwI |
| | | GGATC(4/−5) | Nt.AlwI |
| | | G/GATCC | BamHI |
| | | GGATG(9/13) | FokI |
| | | GGATG(2/0) | BtsCI |
| | | GG/CC | HaelII |
| | | GGCCGG/CC | FseI |
| SEQ ID NO: | 25 | GGCCNNNN/NGGCC | SfiI |
| | | G/GCGCC | KasI |
| | | GG/CGCC | NarI |
| | | GGCGC/C | PluTI |
| | | GGC/GCC | SfoI |
| | | GG/CGCGCC | AscI |
| | | GGCGGA(11/9) | EciI |
| | | GGGAC(10/14) | BsmFI |
| | | GGGCC/C | ApaI |
| | | G/GGCCC | PspOMI |
| | | G/GNCC | Sau96I |
| | | GGN/NCC | NlaIV |
| | | G/GTACC | Acc65I |
| | | GGTAC/C | KpnI |
| | | GGTCTC(1/5) | BsaI v2 |
| | | GGTGA(8/7) | HphI |
| | | G/GTNACC | BstEII |
| | | G/GWCC | AvalI |
| | | G/GYRCC | BanI |
| | | GKGCM/C | BaeGI |
| | | GR/CGYC | BsaHI |
| | | GRGCY/C | BanlI |
| | | GT/AC | RsaI |
| | | G/TAC | CviQI |
| | | GTATAC | BstZ17I |
| | | GTATCC(6/5) | BciVI |
| | | G/TCGAC | SalI |
| | | GTCTC(1/5) | BsmAI Bco |
| | | | DI |
| | | GTCTC(1/−5) | Nt. BsmAI |
| | | G/TGCAC | ApaLI |
| | | GTGCAG(16/14) | BsgI |
| | | GT/MKAC | AccI |
| | | GTN/NAC | Hpy166II |
| | | /GTSAC | Tsp45I |
| | | GTT/AAC | HpaI |
| | | GTTT/AAAC | PmeI |
| | | GTY/RAC | HincII |
| | | GWGCW/C | BsIHKAI |
| | | NNCASTGNN/ | TspRI |
| | | R/AATTY | ApoI |
| | | RCATG/Y | NspI |
| | | R/CCGGY | BsrFI-v2 |
| | | R/GATCY | BstYI |
| | | RGCGC/Y | HaelI |
| | | RG/CY | CviKI-1 |
| | | RG/GNCCY | EcoO109I |
| | | RG/GWCCY | PpuMI |
| SEQ ID NO: | 26 | TAACTATAACGGTCCTAAGGTAGCGAA | I-CeuI |
| | | (−9/−13) | |
| | | TAC/GTA | SnaBI |
| SEQ ID NO: | 27 | TAGGGATAACAGGGTAAT(−9/−13) | I-SceI |
| | | T/CATGA | BspHI |
| | | T/CCGGA | BspEI |
| | | TCCRAC(20/18) | MmeI |
| | | T/CGA | TaqI-v2 |
| | | TCG/CGA | NruI |
| | | TCN/GA | Hpy188I |
| | | TC/NNGA | Hpy188III |
| | | T/CTAGA | XbaI |
| | | T/GATCA | BelI |
| | | TG/CA | HpyCH4V |
| | | TGC/GCA | FspI |
| SEQ ID NO: | 28 | TGGCAAACAGCTATTATGGGTATTATG | PI-PspI |
| | | GGT(−13/−17) | |
| | | TGG/CCA | MscI |
| | | T/GTACA | BsrGI |
| | | T/TAA | MseI |
| | | TTAAT/TAA | PacI |
| | | TTA/TAA | PsiI-v2 |
| | | TT/CGAA | BstBI |
| | | TTT/AAA | DraI |
| | | VC/TCGAGB | PspXI |
| | | W/CCGGW | BsaWI |
| | | YAC/GTR | BsaAI |
| | | Y/GGCCR | EaeI |

[0070] Obviously, in the context of a chemical synthesis of the first molecule, it is not necessary to have cloning (or insertion) sites of the sequence making it possible to target the target region, but rather to take good care to provide a correctly oriented sequence. This is of course however possible.

[0071] The first molecule further consists, on either side of the A region, of A/T-rich sequences, or in the case of RNA, of A/U-rich sequences, in order to allow a certain flexibility of the structure. A/T-rich or A/U rich are understood in the invention to mean a sequence that comprises more than 50% of A or T, or U, preferably more than 50% of T or U, with respect to the total number of nucleotides that constitute the sequence. These sequences on either side of the A region have a size in nucleotides ranging from 10 nucleotides to 60 nucleotides.

[0072] The flexibility of these sequences flanking the A region, due to the presence of numerous A, T or U bases, may have the effect of allowing a recombination via the recombinases that is not sufficiently controlled, maybe even when the complex still has not recognized the target molecule.

[0073] Also, in order to overcome this problem, GC-rich sequences are introduced into each of the A/T-rich, especially T-rich, or A/U-rich, sequences bordering the A region. These G/C-rich regions consist of 6 to 12 nucleotides, in which the amount of C or G or G+C bases is greater than 50% of the nucleotides contained in said G/C-rich sequence.

[0074] In order to stabilize the structure of the first molecule and, as described hereinbefore, prevent inadvertent recombination, the G/C-rich regions are positioned 15 to 52 nucleotides from the end of the A region.

[0075] For greater clarity, if the A region consists of three nucleotides, the central nucleotide corresponding to position 0, the A/T-rich or A/U-rich region begins on the left at position-2, and on the right at position +2. Therefore, on the left, the G/C-rich region is positioned from position-17 to position-54 and, on the right, from position +17 to position +54.

[0076] Another important element: the G/C-rich sequence to the right (or 5′) of the A region is necessarily complementary (according to the Watson and Crick pairing rule) to the G/C-rich region to the right (or 3′) of the A region. Also, the first single-stranded molecule pairs with itself at the G/C-rich regions, which prevents any recombination by the transposases, as long as there is no interaction with the complementary target sequence of the region that is inserted into the A region of the first molecule.

[0077] Finally, the first molecule comprises at its 5′ end a sequence corresponding to a first site for binding to a transposase, and at its 3′ end a second site for binding to said transposase.

[0078] The first binding site and the second binding site are advantageously the same, and above all both correspond to the same strand of the double-stranded binding site of said transposase. This means that the first transposase binding site present in the 5′ region of the first molecule can only be paired integrally, and therefore stably, with the transposase binding site present in the 3′ region.

[0079] The first binding site and the second binding site are advantageously the same, but each correspond to a different strand of the double-stranded transposase binding site. Also, for example, if the first transposase binding site corresponds to the sense strand, the second transposase binding site corresponds to the sequence of the complementary strand. It is then possible to have two configurations: either i) the second binding site which corresponds to the complementary strand is oriented in the 3′-to-5′ direction, in which case it is able to pair with the first transposase binding site and form the double-stranded site, or ii) the second binding site which corresponds to the complementary strand is oriented in the 5′-to-3′ direction, in which case it is not able to pair with the first transposase binding sequence, due to their orientation not being complementary. In the aforementioned case i), if the first single-stranded molecule pairs with itself at the first and second binding sites, it is not possible to form the aforementioned complex, since there are no more single-stranded complementary regions available to pair with the second molecule so as to form two double-stranded transposase binding sites.

[0080] Also, the first molecule, when it lacks a complementary sequence of the target region in the A part, or when it contains such a target sequence but the latter does not interact (does not pair) with said target sequence, forms a three-dimensional structure wherein the entire molecule is single-stranded with the exception of the region corresponding to the G/C-rich regions that pair with one another.

[0081] A schematic representation in paired form is shown in FIGS. 1A to 1E.

### The Second Molecule.

[0082] The second molecule in the complex is structurally similar to the first, so the above explanations apply mutatis mutandis. However, in the second molecule, the B region (or B sequence) and the transposase binding sites are organized differently.

[0083] First of all, the B region is different from the A region of the first molecule. Indeed, for the purposes of directed recombination, there can be no competition for the same target of interest between the first and second molecules.

[0084] It is therefore necessary for the B region to correspond to a second sequence complementary to the target sequence, this second sequence complementary to the target sequence being positioned at 3′ relative to the first sequence recognized by the complementary sequence corresponding to A sequence of the first molecule.

[0085] Consequently, when the first molecule and the second molecule are paired with the target sequence, the target sequence will be bordered by these two molecules, with the first molecule located at 5′ and the second molecule positioned at 3′. The region of the target sequence located between the region of interaction with the first molecule and the region of interaction with the second molecule corresponds to the sequence that will be replaced by that of the third molecule.

### The Third Molecule

[0086] The third molecule in the above-mentioned complex is simpler than the first two (the first and second molecules). The third molecule comprises, in its 5′ part, a transposase binding site which is complementary to the site for binding to said transposase present in the 3′ part of the first molecule. Therefore, when the complex is formed, the (single-stranded) transposase binding half-site located at 3′ of the first molecule may pair with the (single-stranded) transposase binding half-site located at 5′ of the second molecule so as to form a double-stranded transposase binding site, a double-stranded site on which the transposase can bind.

[0087] The 3′ part of the third molecule contains a transposase binding site which is complementary to the site for binding to said transposase present in the 5′ part of the second molecule. Therefore, when the complex is formed, the (single-stranded) transposase binding half-site located at 3′ of the third molecule may pair with the (single-stranded) transposase binding half-site located at 5′ of the second molecule so as to form a double-stranded transposase binding site, a double-stranded site on which the transposase can bind.

[0088] Between the 5′ part, which comprises a transposase-binding half-site, and the 3′ part, which comprises a transposase-binding half-site, the third molecule comprises a replacement sequence, that is, the sequence that will eventually replace the target sequence. This replacement sequence is bordered at 5′ by at least one restriction site and at 3′ by at least one restriction site; these two restriction sites being distinct. Also, the third molecule comprises in the 5′ to 3′ direction: a transposase binding half-site complementary to the transposase binding site of the first molecule, followed by at least one restriction site, followed by the replacement sequence, followed by at least one restriction site different from the restriction site upstream of the replacement sequence, followed finally by a transposase binding half-site complementary to the transposase binding site of the second molecule.

[0089] The replacement sequence corresponds to all or part of the gene coding for the IL2-Rγ protein, that is, all or part of the ILR2γ gene.

[0090] The common gamma chain (γc) (or CD132), is also known as the interleukin-2 receptor gamma subunit or IL-2RG, or IL2-Rγ. It is a cytokine receptor subunit that is common to the receptor complexes of at least six different interleukin receptors: interleukin 2 (IL-2), interleukin 4 (IL-4), interleukin 7 (IL-7), interleukin 9 (IL-9), interleukin 15 (IL-15) and the interleukin-21 receptor. This chain is a glycoprotein belonging to the type I cytokine receptor family expressed on most lymphocyte populations. The ILR2γ gene is located on the mammalian X chromosome.

[0091] IL2-Rγ is expressed on the surface of immature blood cells in bone marrow. One end of the protein resides outside the cell where it binds cytokines, and the other end of the protein resides inside the cell where it transmits signals to the cell nucleus. The common gamma chain associates with other proteins to direct hematopoietic cells to form lymphocytes. The receptor also directs the growth and maturation of lymphocyte subtypes: T lymphocytes, B lymphocytes and natural killer (NK) cells.

[0092] The composition according to the invention makes it possible to obtain the above-mentioned complex. [FIG. 2A-2C] schematically show the complex formed between the first, second and third molecules according to the invention.

[0093] The complex formed from molecules of the composition of the invention, when the three molecules are correctly paired, comprises two pairs of transposase recognition double-stranded binding sites:
[0094] the first pair being obtained by the hybridization of the first molecule with the third molecule, and
[0095] the second pair being obtained by the hybridization of the second molecule with the third molecule.

[0096] The A sequence contained in the first molecule is complementary to the same strand of the nucleic acid which is complementary to the B sequence contained in the second molecule. In other words, the A sequence contained in the first molecule and the B sequence contained in the second molecule are capable of hybridizing with the same nucleic acid simultaneously, since the two sequences A and B do not recognize the same sequence.

[0097] In order to further clarify the remarks, the interest in the present invention is to propose a first molecule and a second molecule, both as defined hereinbefore, the respective sequences A and B being such that they are capable of recognizing, for one, a sequence located at 5′ of the target sequence of the nucleic acid of interest and, for the other, a sequence located at 3′ of the same target sequence of the nucleic acid of interest. The sequences A and B are therefore complementary to regions bordering the sequence of interest, which it is sought to replace, of the nucleic acid molecule of interest.

[0098] The first and second molecules of interest are therefore essential for targeting specifically the molecule of interest, in order to flank the sequence to be replaced.

[0099] The third molecule in the ensemble, in turn, is the one that provides the nucleic acid molecule containing the replacement sequence, that is, a sequence corresponding to all or part of the gene coding for IL2-Rγ.

[0100] From a mechanistic point of view, the complex according to the invention is such that it consists of its three molecules, the first and second molecules being structurally organized in space so that their G/C-rich regions are paired.

[0101] On either side of the third molecule, that is to say at 5′ and at 3′, due to the hybridization with the first and second molecules, two pairs of sites for binding to a transposase allow, when transposase is present, transposase dimers to bind to the ensemble.

[0102] It will be noted that the transposase binding sites of the first molecule can be the same as those of the second molecule, or different. In the case where the binding sequences are the same, the transposases at 5′ of the third molecule (by hybridization of the 5′ part of the third molecule with the first molecule), and at 3′ of the third molecule (by hybridization of the 3′ part of the third molecule with the second molecule) are the same. Also, by way of example, if the binding sites are all binding sites for the Tn5 transposase, the ensemble is associated with two Tn5 transposase dimers.

[0103] It is also possible for the binding sites of the first molecule and of the second molecule not to recognize the same transposase. In this case, and according to the definition given hereinbefore, the 5′ part of the third molecule forms, by hybridization with the first molecule, two double-stranded sites for binding to a first transposase, and the 3′ part of the third molecule forms, by hybridization with the second molecule, two double-stranded sites for binding to a second transposase.

[0104] If the aforementioned complex, linked to two transposase dimers, is next brought into the presence of a nucleic acid molecule of interest, the 5′ part of which is complementary to the A sequence of the first molecule of the ensemble and the 3′ part of which is complementary to the B sequence of the second molecule of the ensemble, then the nucleic acid molecule of interest pairs with the ensemble at the above-described regions A and B. This interaction has the consequence of breaking the interaction of the two G/C-rich sequences of each of the first and second molecules of the ensemble. Therefore, the third molecule and the nucleic acid molecule of interest are moved closer together in space and the transposases can exercise their tagmentation activity, the result of which is the replacement of the sequence of the molecule of interest, bordered by the complementary sequences of the sequences A and B, by the sequence of the third molecule of the ensemble, which is located between the half-sites for binding to the transposase(s) at 5′ and at 3′.

[0105] In the invention, the first, second, and third molecule of the ensemble are advantageously molecules consisting of deoxyribonucleotides, in order to form single-stranded DNA molecules.

[0106] Even more advantageously, the first, second, and third molecules and third molecule of the ensemble are hybrid DNA/RNA molecules, wherein the “backbone” of the molecules is DNA, and the recognition sequences A and B of the nucleic acid molecule of interest and the central region of the third molecule are RNA. This is particularly advantageous when the sequence replacement that enables the invention is to be carried out directly on an RNA molecule.

[0107] FIG. 2A shows the interaction between the molecule of interest and the ensemble according to the invention.

[0108] Advantageously, the invention relates to the aforementioned complex, wherein said first molecule or said second molecule, or both molecules, are coupled with an enzyme, especially via a modified nucleotide. This enzyme is intended to promote the replacement of the molecule of interest. It may be:
[0109] a helicase, an enzyme capable of opening a double-stranded molecule that is supercoiled or even associated with proteins such as histones,
[0110] a topoisomerase, an enzyme acting on the topological structure of the DNA by generating transient breaks,
[0111] a ligase that forms a phosphodiester bond between the 5′ phosphate end of a nucleotide and the 3′ OH end of another nucleotide,
[0112] a polymerase, which synthesizes a nucleic acid molecule from an initiation site, free 3′OH, in the 5′->3′ direction, notably by copying an antiparallel complementary strand according to Watson and Crick's model.

[0113] It is also possible to combine two or more of said enzymes in order to have all the enzymatic material necessary to enable the sequence replacement contemplated in the scope of the invention.

[0114] In one particular aspect, the first molecule of the ensemble can contain in its 5′ part, more precisely between the first transposase binding site and the A region, one or more modified nucleotides. In the same way, the third molecule of the ensemble can contain in its 3′ part, more precisely between the first transposase binding site and the 3 region, one or more modified nucleotides.

[0115] This modified nucleotide is especially modified by grafting a substituted carbon chain with a protein tag, or else a molecule enabling a specific interaction such as streptavidin or biotin.

[0116] Such modifications then make it possible to specifically bind, to the first molecule of the ensemble, enzymes which can be useful for promoting tagmentation, and sequence replacement. It is particularly advantageous to have, for example, streptavidin grafting, which makes it possible to graft a biotinylated helicase (or conversely a helicase grafted to the streptavidin and a biotinylated nucleotide) useful for opening a double-stranded molecule. It is also possible to contemplate grafting with a biotinylated ligase (or coupled with streptavidin), in order to connect the recombinant strand on the 3′ side.

[0117] It is also possible to associate with the first molecule or with the second molecule of the ensemble an oligonucleotide, so that said oligonucleotide pairs on a predetermined region of said first or second molecule. This oligonucleotide is then advantageously coupled with a grafting molecule as explained hereinbefore.

[0118] Advantageously, the invention relates to the above-mentioned composition, wherein said A sequence comprises a sequence complementary to the sequence of a first region of the gene coding for IL2-Rγ, and wherein said B sequence comprises a sequence complementary to the sequence of a second region of the gene coding for IL2-Rγ, said A sequence and said B sequence being two different sequences, said first and second regions of the gene coding for IL2-Rγ, flanking a region comprising a sequence coding for a portion of IL2-Rγ, or coding for the complete IL2-Rγ receptor.

[0119] As explained above, in order to replace the target gene with the third molecule, it is advantageous for the sequences of part A of the first molecule and part B of the second molecule to be able:
[0120] to recognize the same target molecule, and
[0121] to frame the target region to be replaced, meaning that the first molecule must, via its A region, recognize a sequence upstream of the sequence to be replaced in the target molecule, and the second molecule must, via its B region, recognize a sequence downstream of the sequence to be replaced in the target molecule, or vice versa, that is, the first molecule must, via its A region, recognize a sequence downstream of the sequence to be replaced in the target molecule, and the second molecule must, via its B region, recognize a sequence downstream of the sequence to be replaced in the target molecule.

[0122] It is thus possible to replace any target sequence with any replacement sequence, as long as the A and B sequences of the first and second molecules respectively recognize the target region and frame it.

[0123] In the invention, it is particularly advantageous for all or part of the gene coding for IL2-Rγ to be replaced by the sequence of the third molecule. This is particularly advantageous when the target sequence comprises one or more mutations relative to the wild-type reference sequence, for example, a substitution of one or more contiguous or spaced nucleotides, a deletion of one or more contiguous or spaced nucleotides, or an insertion of one or more contiguous or spaced nucleotides.

[0124] The entire gene coding for IL2-Rγ is taken to mean the entire sequence of said gene including the 5′, 3′ regulatory elements, exons and introns.

[0125] In the context of the invention, “parts of the gene coding for IL2-Rγ” is taken to mean a part of the gene which does not enable the IL2-Rγ protein to be fully encoded. This may include, but is not limited to, an intro, an exon, several introns and exons, without the entire translational unit being complete, etc. It may be particularly advantageous to replace only part of the gene coding for IL2-Rγ, for example to replace only one exon in which a mutation is present. In this case, it may be advantageous to choose a sequence complementary to the A region of the first molecule in the intron preceding the sequence to be replaced, and a complementary part of the B region in the intron following the exon to be replaced. Of course, depending on the desired substitution, the person skilled in the art will be able to choose between the whole gene or a part of the gene, and thus define the most relevant A and B regions.

[0126] Advantageously, the invention relates to the composition as defined hereinbefore, wherein said first molecule comprises at its 5′ end a first sequence oriented 5′-to-3′ for recognizing a transposase and at its 3′ end a second sequence oriented 5′-to-3′ for recognizing said transposase and
[0127] wherein the third molecule comprises at its 5′ end a first complementary sequence of said first sequence for recognizing said transposase of the first molecule followed by a second complementary sequence of said second sequence for recognizing said transposase of the first molecule.

[0128] Even more advantageously, the invention relates to the composition as defined hereinbefore, wherein said first molecule comprises at its 5′ end a first sequence oriented 5′-to-3′ for recognizing a transposase and at its 3′ end a second sequence oriented 5′-to-3′ for recognizing said transposase,
[0129] said second molecule comprises at its 5′ end a first sequence oriented 5′-to-3′ for recognizing a transposase and at its 3′ end a second sequence oriented 5′-to-3′ for recognizing said transposase, and
[0130] wherein the third molecule comprises at its 5′ end a first complementary sequence of said first sequence for recognizing said transposase of the first molecule followed by a second complementary sequence of said second sequence for recognizing said transposase of the first molecule, and at its 3′ end, a first sequence complementary to said first sequence for recognizing said transposase of the second molecule followed by a second sequence complementary to said second sequence for recognizing said transposase of the second molecule.

[0131] A possible format for the first and second molecules of the invention is defined here. This configuration is shown in [FIG. 1B]. Of course, in this example of the configuration of the first, second and third molecules, between the two transposase half-sites of the 5′ and 3′ parts of the third molecule is the replacement sequence, in this case all or part of the gene coding for IL2-Rγ.

[0132] Advantageously, the invention relates to the aforementioned composition, wherein said first molecule comprises at its 5′ end a first sequence oriented 5′-to-3′ for recognizing a transposase and at its 3′ end a second sequence for recognizing said transposase, followed by a first complementary sequence of said first sequence for recognizing said transposase of the first molecule and
[0133] wherein the third molecule comprises at its 5′ end a complementary sequence of said second sequence for recognizing said transposase of the first molecule.

[0134] Even more advantageously, the invention relates to the aforementioned composition, wherein said first molecule comprises at its 5′ end a first sequence oriented 5′-to-3′ for recognizing a transposase and at its 3′ end a second sequence for recognizing said transposase, followed by a first complementary sequence of said first sequence for recognizing said transposase of the first molecule,
[0135] the second molecule comprises at its 5′ end a first sequence oriented 5′-to-3′ for recognizing a transposase and at its 3′ end a second sequence for recognizing a transposase, said first sequence for recognizing said transposase of the 5′ end being preceded by a second sequence complementary to said second sequence for recognizing said transposase of the first molecule,
[0136] and
[0137] wherein the third molecule comprises at its 5′ end a complementary sequence of said second sequence for recognizing said transposase of the first molecule and at its 3′ end a complementary sequence of said first sequence for recognizing said transposase of the second molecule.

[0138] Another possible format for the first and second molecules of the invention is defined here. This configuration is shown in [FIG. 1C] and [FIG. 1D]. Of course, in this example of the configuration of the first, second and third molecules, between the two transposase half-sites of the 5′ and 3′ parts of the third molecule is the replacement sequence, in this case all or part of the gene coding for IL2-Rγ.

[0139] Advantageously, the invention relates to the aforementioned composition, wherein said first molecule comprises at its 5′ end a first sequence oriented 5′-to-3′ for recognizing a transposase and at its 3′ end a second sequence complementary to said first sequence for recognizing said transposase of the first molecule, followed by a second sequence for recognizing said transposase, and
[0140] wherein the third molecule comprises at its 5′ end a complementary sequence of said second sequence for recognizing said transposase of the first molecule.

[0141] Even more advantageously, the invention relates to the aforementioned composition, wherein said first molecule comprises at its 5′ end a first sequence oriented 5′-to-3′ for recognizing a transposase and at its 3′ end a first sequence complementary to said first sequence for recognizing said transposase of the first molecule, followed by a second sequence for recognizing said transposase,
[0142] the second molecule comprises at its 5′ end a first sequence oriented 5′-3′ for recognizing a transposase and at its 3′ end a second sequence for recognizing said transposase of the first molecule, said first sequence being followed by a second sequence complementary to said second sequence for recognizing said transposase of the first molecule, and
[0143] wherein the third molecule comprises at its 5′ end a complementary sequence of said second sequence for recognizing said transposase of the first molecule and at its 3′ end a complementary sequence of the first sequence for recognizing the transposase of the second molecule.

[0144] This configuration is diagrammed in [FIG. 1E]. Of course, in this example of the configuration of the first, second and third molecules, between the two transposase half-sites of the 5′ and 3′ parts of the third molecule is the replacement sequence, in this case all or part of the gene coding for IL2-Rγ.

[0145] Advantageously, the invention relates to the above-mentioned composition, wherein said transposase is a bacterial transposase, especially a transposase selected from Tn5, Tn9, Tn10 or Tc1/mariner.

[0146] Advantageously, the aforementioned transposase is a bacterial-type transposase selected from the transposase of transposon Tn5, the transposase of transposon Tn9, the transposase of transposon Tn10, Tn903, Tn602, or even the transposase of the transposon Tc1, or more generally of the mariner transposon superfamily.

[0147] Other examples of transposases that can be used in the context of the invention are: the Vibrio harveyi transposase (transposase characterized by Agilent and used in the product SureSelect QXT), the MutA transposase and a Mu transposase recognition site comprising the terminal sequences R1 and R2, the transposase of Staphylococcus aureus transposon Tn552, the transposase of transposon Tn7, the Tn/O and IS10 transposase, the transposase of transposon Tn3.

[0148] The Tn5 transposase is the best known. It is coded by the Tnp gene of transposon Tn5. The transposase initiates the transposition by forming a transposase dimer which binds to its target sequences. In the context of this complex, the transposase then catalyzes four phosphoryl transfer reactions (DNA cleavage, DNA hairpin formation, hairpin resolution and strand transfer to the target DNA), resulting in the integration of the transposon into its new DNA site: this is what is known as tagmentation.

[0149] The invention is based on this tagmentation principle. By using the tagmentation properties of the transposases, it is possible to insert one sequence into another in a targeted manner, by virtue of the aforementioned complex.

[0150] Also in the context of the invention, when reference is made to a transposase, reference is being made to one of the aforementioned transposases, namely the transposases of transposons Tn5, Tn9, Tn10 or Tc1/mariner (or transposases mutated to increase their transposition or tagmentation activity).

[0151] In the invention, when several transposases are used simultaneously, one binding to the complex formed by the first molecule and the third molecule, and the other binding to the complex formed by the second molecule and the third molecule, the pairs of transposases resulting from transposons Tn5 and Tn10 are preferred.

[0152] Advantageously, the first and the second transposase recognition sequence are sequences for recognizing the Tn5 transposase having one of the following sequences:

(SEQ ID NO: 29)
-CTGtCTCTTataCAcAtcT,
(SEQ ID NO: 30)
-CTGACTCTTataCACAagT,
and
(SEQ ID NO: 31)
-CTGtCTCTTgatCAgATCT

[0153] As a result, the corresponding complementary sequences are as follows:

(SEQ ID NO: 32)
-AgaTgTGtatAAGAGaCAG, complementary to the
sequence SEQ ID NO: 29,
(SEQ ID NO: 33)
-ActTGTGtatAAGAGTCAG, complementary to the
sequence SEQ ID NO: 30,
and
(SEQ ID NO: 34)
-AGATCTGatcAAGAGaCAG, complementary to the
sequence SEQ ID NO: 31.

[0154] Other recognition sequences of a transposase are as follows:

Tn5MErev,
(SEQ ID NO: 35)
5′-[phos]CTGTCTCTTATACACATCT-3′
Tn5ME-A (Illumina FC-121-1030),
(SEQ ID NO: 36)
5′-TCGTCGGCAGCGTCAGATGTGTATAAGAGACAG-3′;
and
Tn5ME-B (Illumina FC-121-1031),
(SEQ ID NO: 37)
5′-GTCTCGTGGGCTCGGAGATGTGTATAAGAGACAG-3′

[0155] Other transposase recognition sequences are as follows:
[0156] sense sequence SEQ ID NO: i
[0157] antisense sequence SEQ ID NO: i+1,

[0158] wherein i ranges from 38 to 192.

[0159] This means for example that the following respective sense and antisense sequence pairs are considered: SEQ ID NO: 38 and SEQ ID NO: 39; SEQ ID NO: 40 and SEQ ID NO: 41, SEQ ID NO: 42 and SEQ ID NO: 43, SEQ ID NO: 44 and SEQ ID NO: 45, SEQ ID NO: 46 and SEQ ID NO: 47, SEQ ID NO: 48 and SEQ ID NO: 49, SEQ ID NO: 50 and SEQ ID NO: 51, SEQ ID NO: 52 and SEQ ID NO: 53, SEQ ID NO: 54 and SEQ ID NO: 55, SEQ ID NO: 56 and SEQ ID NO: 57, SEQ ID NO: 58 and SEQ ID NO: 59, SEQ ID NO: 60 and SEQ ID NO: 61, SEQ ID NO: 62 and SEQ ID NO: 63, SEQ ID NO: 64 and SEQ ID NO: 65, SEQ ID NO: 66 and SEQ ID NO: 67, SEQ ID NO: 68 and SEQ ID NO: 69, SEQ ID NO: 70 and SEQ ID NO: 71, SEQ ID NO: 72 and SEQ ID NO: 73, SEQ ID NO: 74 and SEQ ID NO: 75, SEQ ID NO: 76 and SEQ ID NO: 77, SEQ ID NO: 78 and SEQ ID NO: 79, SEQ ID NO: 80 and SEQ ID NO: 81, SEQ ID NO: 82 and SEQ ID NO: 83, SEQ ID NO: 84 and SEQ ID NO: 85, SEQ ID NO: 86 and SEQ ID NO: 87, SEQ ID NO: 88 and SEQ ID NO: 89, SEQ ID NO: 90 and SEQ ID NO: 91, SEQ ID NO: 92 and SEQ ID NO: 93, SEQ ID NO: 94 and SEQ ID NO: 95, SEQ ID NO: 96 and SEQ ID NO: 97, SEQ ID NO: 98 and SEQ ID NO: 99, SEQ ID NO: 100 and SEQ ID NO: 101, SEQ ID NO: 102 and SEQ ID NO: 103, SEQ ID NO: 104 and SEQ ID NO: 105, SEQ ID NO: 106 and SEQ ID NO: 107, SEQ ID NO: 108 and SEQ ID NO: 109, SEQ ID NO: 110 and SEQ ID NO: 111, SEQ ID NO: 112 and SEQ ID NO: 113, SEQ ID NO: 114 and SEQ ID NO: 115, SEQ ID NO: 116 and SEQ ID NO: 117, SEQ ID NO: 118 and SEQ ID NO: 119, SEQ ID NO: 120 and SEQ ID NO: 121, SEQ ID NO: 122 and SEQ ID NO: 123, SEQ ID NO: 124 and SEQ ID NO: 125, SEQ ID NO: 126 and SEQ ID NO: 127, SEQ ID NO: 128 and SEQ ID NO: 129, SEQ ID NO: 130 and SEQ ID NO: 131, SEQ ID NO: 132 and SEQ ID NO: 133, SEQ ID NO: 134 and SEQ ID NO: 135, SEQ ID NO: 136 and SEQ ID NO: 137, SEQ ID NO: 138 and SEQ ID NO: 139, SEQ ID NO: 140 and SEQ ID NO: 141, SEQ ID NO: 142 and SEQ ID NO: 143, SEQ ID NO: 144 and SEQ ID NO: 145, SEQ ID NO: 146 and SEQ ID NO: 147, SEQ ID NO: 148 and SEQ ID NO: 149, SEQ ID NO: 150 and SEQ ID NO: 151, SEQ ID NO: 152 and SEQ ID NO: 153, SEQ ID NO: 154 and SEQ ID NO: 155, SEQ ID NO: 156 and SEQ ID NO: 157, SEQ ID NO: 158 and SEQ ID NO: 159, SEQ ID NO: 160 and SEQ ID NO: 161, SEQ ID NO: 162 and SEQ ID NO: 163, SEQ ID NO: 164 and SEQ ID NO: 165, SEQ ID NO: 166 and SEQ ID NO: 167, SEQ ID NO: 168 and SEQ ID NO: 169, SEQ ID NO: 170 and SEQ ID NO: 171, SEQ ID NO: 172 and SEQ ID NO: 173, SEQ ID NO: 174 and SEQ ID NO: 175, SEQ ID NO: 176 and SEQ ID NO: 177, SEQ ID NO: 178 and SEQ ID NO: 179, SEQ ID NO: 180 and SEQ ID NO: 181, SEQ ID NO: 182 and SEQ ID NO: 183, SEQ ID NO: 184 and SEQ ID NO: 185, SEQ ID NO: 186 and SEQ ID NO: 187, SEQ ID NO: 188 and SEQ ID NO: 189, SEQ ID NO: 190 and SEQ ID NO: 191, and SEQ ID NO: 192 and SEQ ID NO: 193.

[0160] Advantageously, the first G/C-rich domain of the first molecule (or second molecule) corresponds to the following sequence GG CGATCGC (SEQ ID NO: 194) so that the second G/C-rich domain is the same. Indeed, due to the folding of the molecule onto itself, the second G/C-rich domain is in a complementary and antiparallel orientation with respect to the first G/C-rich domain, and the interaction takes place at the palindromic region (underlined in the sequence hereinbefore).

[0161] The first and second G/C-rich domains may also be the following sequence GCGGCGATCGGC (SEQ ID NO: 195). The explanations hereinbefore apply mutatis mutandis.

[0162] Other sequences of the G/C-rich domains of the first or second molecule may be as follows:

-first G/C-rich domain of sequence
(SEQ ID NO: 196)
GGTCGC
and
the second G/C-rich domain of sequence
(SEQ ID NO: 197)
GCGACC.

[0163] These examples are given only by way of illustration and cannot limit the scope of the invention.

[0164] In one advantageous embodiment, the A/T-rich sequences of the first molecule of said complex consist essentially, or are made up of A or T.

[0165] Even more advantageously, the A/T-rich sequence of the first molecule of said complex consists of T.

[0166] Advantageously, the invention relates to the aforementioned composition wherein the gene coding for IL2-Rγ comprises the sequence SEQ ID NO: 1 or the sequence SEQ ID NO: 2 or the sequence SEQ ID NO: 3.

[0167] The sequence SEQ ID NO: 1 corresponds to the complete human IL2Rγ gene, referenced under GenBank number: AY692262.1. This gene is also known by the following names: P64, CIDX, IMD4, CD132, SCIDX, IL-2RG and SCIDX1. It makes 7130 bases.

[0168] The exons of the gene correspond to sequences delimited as follows:
[0169] Exon 1: from 1956 (first nucleotide of the ATG initiator codon) to 2070, and intron 1: from 2071 to 2448,
[0170] Exon 2: from 2449 to 2602, and intron 2: from 2603 to 2810,
[0171] Exon 3: from 2811 to 2995, and intron 3: from 2996 to 3203, Exon 4: from 3204 to 3343, and intron 4: from 3344 to 4108,
[0172] Exon 5: from 4109 to 4271, and intron 5: from 4272 to 4803,
[0173] Exon 6: from 4804 to 4900, and intron 6: from 4901 to 5152,
[0174] Exon 7: from 5153 to 5222, and intron 7: from 5223 to 5577, and
[0175] Exon 8: from 5578 to 5763 (last nucleotide of the stop codon),
[0176] The sequence SEQ ID NO: 2 corresponds to a fragment of SEQ ID NO: 1, since its sequence starts at position 1956 of sequence SEQ ID NO: 1 and ends at the stop codon at position 5763 of SEQ ID NO: 1.

[0177] The sequence SEQ ID NO: 3 corresponds to the coding region (or CDS) of the gene. It is the one corresponding to the combination of the above-mentioned exons. This sequence is referenced under the GenBank number: AK314932.1.

[0178] In view of the above-mentioned breakdown, the person skilled in the art may choose a part of the gene as defined above, in order to achieve a partial substitution of the gene. For example, and without limitation, if it is desired to replace exon 1, it will be possible to target intron 1 with the first molecule, intron 2 with the second molecule, while the third molecule will comprise the exon 2 sequence.

[0179] Even more advantageously, the invention relates to the composition as defined above, where the first, second and third molecules are chosen from the triplets as defined in Table 2 below.

[0180] Advantageously, the invention relates to a composition comprising one of the triplets of first, second and third molecules described in the following table 2

TABLE 2

| | First molecule | Second molecule | Third molecule |
|---|---|---|---|
| Triplet | SEQ ID NO: | SEQ ID NO: | SEQ ID NO: |
| #1 | 198 | 199 | 200 |
| #2 | 201 | 202 | 203 |
| #3 | 204 | 205 | 206 |
| #4 | 207 | 208 | 209 |
| #5 | 210 | 211 | 212 |
| #6 | 213 | 214 | 215 |
| #7 | 216 | 217 | 218 |
| #8 | 219 | 220 | 221 |
| #9 | 222 | 223 | 224 |
| #10 | 225 | 226 | 227 |
| #11 | 228 | 229 | 230 |
| #12 | 231 | 232 | 233 |
| #13 | 234 | 235 | 236 |
| #14 | 237 | 238 | 239 |
| #15 | 240 | 241 | 242 |
| #16 | 243 | 244 | 245 |
| #17 | 246 | 247 | 248 |
| #18 | 249 | 250 | 251 |
| #19 | 252 | 253 | 254 |
| #20 | 255 | 256 | 257 |
| #21 | 258 | 259 | 260 |
| #22 | 261 | 262 | 263 |
| #23 | 264 | 265 | 266 |
| #24 | 267 | 268 | 269 |
| #25 | 270 | 271 | 272 |
| #26 | 273 | 274 | 275 |
| #27 | 276 | 277 | 278 |
| #28 | 279 | 280 | 281 |
| #29 | 282 | 283 | 284 |
| #30 | 285 | 286 | 287 |
| #31 | 288 | 289 | 290 |
| #32 | 291 | 292 | 293 |
| #33 | 294 | 295 | 296 |
| #34 | 297 | 298 | 299 |
| #35 | 300 | 301 | 302 |
| #36 | 303 | 304 | 305 |
| #37 | 306 | 307 | 308 |
| #38 | 309 | 310 | 311 |
| #39 | 312 | 313 | 314 |
| #40 | 315 | 316 | 317 |
| #41 | 318 | 319 | 320 |
| #42 | 321 | 322 | 323 |
| #43 | 324 | 325 | 326 |
| #44 | 327 | 328 | 329 |
| #45 | 330 | 331 | 332 |
| #46 | 333 | 334 | 335 |
| #47 | 336 | 337 | 338 |
| #48 | 339 | 340 | 341 |
| #49 | 342 | 343 | 344 |
| #50 | 345 | 346 | 347 |
| #51 | 348 | 349 | 350 |
| #52 | 351 | 352 | 353 |
| #53 | 354 | 355 | 356 |
| #54 | 357 | 358 | 359 |
| #55 | 360 | 361 | 362 |
| #56 | 363 | 364 | 365 |
| #57 | 366 | 367 | 368 |
| #58 | 369 | 370 | 371 |
| #59 | 372 | 373 | 374 |
| #60 | 375 | 376 | 377 |
| #61 | 378 | 379 | 380 |
| #62 | 381 | 382 | 383 |
| #63 | 384 | 385 | 386 |
| #64 | 387 | 388 | 389 |
| #65 | 390 | 391 | 392 |
| #66 | 393 | 394 | 395 |
| #67 | 396 | 397 | 398 |
| #68 | 399 | 400 | 401 |
| #69 | 402 | 403 | 404 |
| #70 | 405 | 406 | 407 |
| #71 | 408 | 409 | 410 |
| #72 | 411 | 412 | 413 |
| #73 | 414 | 415 | 416 |
| #74 | 417 | 418 | 419 |
| #75 | 420 | 421 | 422 |
| #76 | 423 | 424 | 425 |
| #77 | 426 | 427 | 428 |
| #78 | 429 | 430 | 431 |
| #79 | 432 | 433 | 434 |
| #80 | 435 | 436 | 437 |
| #81 | 438 | 439 | 440 |
| #82 | 441 | 442 | 443 |
| #83 | 444 | 445 | 446 |
| #84 | 447 | 448 | 449 |
| #85 | 450 | 451 | 452 |
| #86 | 453 | 454 | 455 |
| #87 | 456 | 457 | 458 |
| #88 | 459 | 460 | 461 |
| #89 | 462 | 463 | 464 |
| #90 | 465 | 466 | 467 |
| #91 | 468 | 469 | 470 |
| #92 | 471 | 472 | 473 |
| #93 | 474 | 475 | 476 |
| #94 | 477 | 478 | 479 |
| #95 | 480 | 481 | 482 |
| #96 | 483 | 484 | 485 |
| #97 | 486 | 487 | 488 |
| #98 | 489 | 490 | 491 |
| #99 | 492 | 493 | 494 |
| #100 | 495 | 496 | 497 |
| #101 | 498 | 499 | 500 |
| #102 | 501 | 502 | 503 |
| #103 | 504 | 505 | 506 |
| #104 | 507 | 508 | 509 |
| #105 | 510 | 511 | 512 |
| #106 | 513 | 514 | 515 |
| #107 | 516 | 517 | 518 |
| #108 | 519 | 520 | 521 |
| #109 | 522 | 523 | 524 |
| #110 | 525 | 526 | 527 |
| #111 | 528 | 529 | 530 |
| #112 | 531 | 532 | 533 |
| #113 | 534 | 535 | 536 |
| #114 | 537 | 538 | 539 |
| #115 | 540 | 541 | 542 |
| #116 | 543 | 544 | 545 |
| #117 | 546 | 547 | 548 |
| #118 | 549 | 550 | 551 |
| #119 | 552 | 553 | 554 |
| #120 | 555 | 556 | 557 |
| #121 | 558 | 559 | 560 |
| #122 | 561 | 562 | 563 |
| #123 | 564 | 565 | 566 |
| #124 | 567 | 568 | 569 |
| #125 | 570 | 571 | 572 |
| #126 | 573 | 574 | 575 |
| #127 | 576 | 577 | 578 |
| #128 | 579 | 580 | 581 |
| #129 | 582 | 583 | 584 |
| #130 | 585 | 586 | 587 |
| #131 | 588 | 589 | 590 |
| #132 | 591 | 592 | 593 |
| #133 | 594 | 595 | 596 |
| #134 | 597 | 598 | 599 |
| #135 | 600 | 601 | 602 |
| #136 | 603 | 604 | 605 |
| #137 | 606 | 607 | 608 |
| #138 | 609 | 610 | 611 |
| #139 | 612 | 613 | 614 |
| #140 | 615 | 616 | 617 |
| #141 | 618 | 619 | 620 |
| #142 | 621 | 622 | 623 |
| #143 | 624 | 625 | 626 |
| #144 | 627 | 628 | 629 |
| #145 | 630 | 631 | 632 |
| #146 | 633 | 634 | 635 |
| #147 | 636 | 637 | 638 |
| #148 | 639 | 640 | 641 |
| #149 | 642 | 643 | 644 |
| #150 | 645 | 646 | 647 |
| #151 | 648 | 649 | 650 |
| #152 | 651 | 652 | 653 |
| #153 | 654 | 655 | 656 |
| #154 | 657 | 658 | 659 |
| #155 | 660 | 661 | 662 |
| #156 | 663 | 664 | 665 |
| #157 | 666 | 667 | 668 |
| #158 | 669 | 670 | 671 |
| #159 | 672 | 673 | 674 |
| #160 | 675 | 676 | 677 |
| #161 | 678 | 679 | 680 |
| #162 | 681 | 682 | 683 |
| #163 | 684 | 685 | 686 |
| #164 | 687 | 688 | 689 |
| #165 | 690 | 691 | 692 |
| #166 | 693 | 694 | 695 |
| #167 | 696 | 697 | 698 |
| #168 | 699 | 700 | 701 |
| #169 | 702 | 703 | 704 |
| #170 | 705 | 706 | 707 |
| #171 | 708 | 709 | 710 |
| #172 | 711 | 712 | 713 |
| #173 | 714 | 715 | 716 |
| #174 | 717 | 718 | 719 |
| #175 | 720 | 721 | 722 |
| #176 | 723 | 724 | 725 |
| #177 | 726 | 727 | 728 |
| #178 | 729 | 730 | 731 |
| #179 | 732 | 733 | 734 |
| #180 | 735 | 736 | 737 |
| #181 | 738 | 739 | 740 |
| #182 | 741 | 742 | 743 |
| #183 | 744 | 745 | 746 |
| #184 | 747 | 748 | 749 |
| #185 | 750 | 751 | 752 |
| #186 | 753 | 754 | 755 |
| #187 | 756 | 757 | 758 |
| #188 | 759 | 760 | 761 |
| #189 | 762 | 763 | 764 |
| #190 | 765 | 766 | 767 |
| #191 | 768 | 769 | 770 |
| #192 | 771 | 772 | 773 |
| #193 | 774 | 775 | 776 |
| #194 | 777 | 778 | 779 |
| #195 | 780 | 781 | 782 |
| #196 | 783 | 784 | 785 |
| #197 | 786 | 787 | 788 |
| #198 | 789 | 790 | 791 |
| #199 | 792 | 793 | 794 |
| #200 | 795 | 796 | 797 |
| #201 | 798 | 799 | 800 |
| #202 | 801 | 802 | 803 |
| #203 | 804 | 805 | 806 |
| #204 | 807 | 808 | 809 |
| #205 | 810 | 811 | 812 |
| #206 | 813 | 814 | 815 |
| #207 | 816 | 817 | 818 |
| #208 | 819 | 820 | 821 |
| #209 | 822 | 823 | 824 |
| #210 | 825 | 826 | 827 |
| #211 | 828 | 829 | 830 |
| #212 | 831 | 832 | 833 |
| #213 | 834 | 835 | 836 |
| #214 | 837 | 838 | 839 |
| #215 | 840 | 841 | 842 |
| #216 | 843 | 844 | 845 |
| #217 | 846 | 847 | 848 |
| #218 | 849 | 850 | 851 |
| #219 | 852 | 853 | 854 |
| #220 | 855 | 856 | 857 |
| #221 | 858 | 859 | 860 |
| #222 | 861 | 862 | 863 |
| #223 | 864 | 865 | 866 |
| #224 | 867 | 868 | 869 |
| #225 | 870 | 871 | 872 |
| #226 | 873 | 874 | 875 |
| #227 | 876 | 877 | 878 |
| #228 | 879 | 880 | 881 |
| #229 | 882 | 883 | 884 |
| #230 | 885 | 886 | 887 |
| #231 | 888 | 889 | 890 |
| #232 | 891 | 892 | 893 |
| #233 | 894 | 895 | 896 |
| #234 | 897 | 898 | 899 |
| #235 | 900 | 901 | 902 |
| #236 | 903 | 904 | 905 |
| #237 | 906 | 907 | 908 |
| #238 | 909 | 910 | 911 |
| #239 | 912 | 913 | 914 |
| #240 | 915 | 916 | 917 |
| #241 | 918 | 919 | 920 |
| #242 | 921 | 922 | 923 |
| #243 | 924 | 925 | 926 |
| #244 | 927 | 928 | 929 |
| #245 | 930 | 931 | 932 |
| #246 | 933 | 934 | 935 |
| #247 | 936 | 937 | 938 |
| #248 | 939 | 940 | 941 |
| #249 | 942 | 943 | 944 |
| #250 | 945 | 946 | 947 |
| #251 | 948 | 949 | 950 |
| #252 | 951 | 952 | 953 |
| #253 | 954 | 955 | 956 |
| #254 | 957 | 958 | 959 |
| #255 | 960 | 961 | 962 |
| #256 | 963 | 964 | 965 |
| #257 | 966 | 967 | 968 |
| #258 | 969 | 970 | 971 |
| #259 | 972 | 973 | 974 |
| #260 | 975 | 976 | 977 |
| #261 | 978 | 979 | 980 |
| #262 | 981 | 982 | 983 |
| #263 | 984 | 985 | 986 |
| #264 | 987 | 988 | 989 |
| #265 | 990 | 991 | 992 |
| #266 | 993 | 994 | 995 |
| #267 | 996 | 997 | 998 |
| #268 | 999 | 1000 | 1001 |
| #269 | 1002 | 1003 | 1004 |
| #270 | 1005 | 1006 | 1007 |
| #271 | 1008 | 1009 | 1010 |
| #272 | 1011 | 1012 | 1013 |
| #273 | 1014 | 1015 | 1016 |
| #274 | 1017 | 1018 | 1019 |
| #275 | 1020 | 1021 | 1022 |
| #276 | 1023 | 1024 | 1025 |
| #277 | 1026 | 1027 | 1028 |
| #278 | 1029 | 1030 | 1031 |
| #279 | 1032 | 1033 | 1034 |
| #280 | 1035 | 1036 | 1037 |
| #281 | 1038 | 1039 | 1040 |
| #282 | 1041 | 1042 | 1043 |
| #283 | 1044 | 1045 | 1046 |
| #284 | 1047 | 1048 | 1049 |
| #285 | 1050 | 1051 | 1052 |
| #286 | 1053 | 1054 | 1055 |
| #287 | 1056 | 1057 | 1058 |
| #288 | 1059 | 1060 | 1061 |
| #289 | 1062 | 1063 | 1064 |
| #290 | 1065 | 1066 | 1067 |
| #291 | 1068 | 1069 | 1070 |
| #292 | 1071 | 1072 | 1073 |
| #293 | 1074 | 1075 | 1076 |
| #294 | 1077 | 1078 | 1079 |
| #295 | 1080 | 1081 | 1082 |
| #296 | 1083 | 1084 | 1085 |
| #297 | 1086 | 1087 | 1088 |
| #298 | 1089 | 1090 | 1091 |
| #299 | 1092 | 1093 | 1094 |
| #300 | 1095 | 1096 | 1097 |
| #301 | 1098 | 1099 | 1100 |
| #302 | 1101 | 1102 | 1103 |
| #303 | 1104 | 1105 | 1106 |
| #304 | 1107 | 1108 | 1109 |
| #305 | 1110 | 1111 | 1112 |
| #306 | 1113 | 1114 | 1115 |
| #307 | 1116 | 1117 | 1118 |
| #308 | 1119 | 1120 | 1121 |
| #309 | 1122 | 1123 | 1124 |
| #310 | 1125 | 1126 | 1127 |
| #311 | 1128 | 1129 | 1130 |
| #312 | 1131 | 1132 | 1133 |

[0181] Also advantageously, the invention relates to the above-mentioned composition, said composition comprising a triplet selected from the above-mentioned triplets #1 to #312.

[0182] Advantageously, the invention relates to the composition described above, further comprising
[0183] a fourth single-stranded nucleic acid molecule comprising or consisting essentially of an A′sequence allowing the insertion of a complementary sequence of a nucleic acid of interest, or comprising a complementary sequence of a nucleic acid of interest, said complementary sequence binding at 5′ to a fifth T-rich sequence of 40 to 60 nucleotides in length and at 3′ to a sixth T-rich sequence of 40 to 60 nucleotides in length, said fifth and sixth T-rich sequences respectively comprising a fifth and a sixth domain of 6 to 12 G/C-rich nucleotides, the sequence of the fifth domain being complementary to the sequence of the sixth domain, said fifth and sixth domains being positioned 15 to 52 nucleotides from said A′ sequence, said fourth molecule comprising at its 5′ end at least one first sequence oriented 5′-to-3′ for recognizing a transposase and at its 3′ end a second sequence for recognizing said transposase,
[0184] a fifth single-stranded nucleic acid molecule comprising or consisting essentially of a B′sequence allowing the insertion of a complementary sequence of a nucleic acid of interest, or comprising a complementary sequence of a nucleic acid of interest, said complementary B′ sequence binding at 5′ to a seventh T-rich sequence of 40 to 60 nucleotides in length and at 3′ to an eighth T-rich sequence of 40 to 60 nucleotides in length, said seventh and eighth T-rich sequences respectively comprising a third and a fourth domain of 6 to 12 G-C-rich nucleotides, the sequence of the seventh domain being complementary to the sequence of the eighth domain, said seventh and eighth domains being positioned 15 to 52 nucleotides from said B′ sequence, said fifth molecule comprising at its 5′ end at least one first sequence oriented 5′-to-3′ for recognizing said transposase and at its 3′ end the second sequence for recognizing said transposase,

[0185] said B′ sequence being a complementary sequence of said nucleic acid of interest, the A′ sequence being positioned at 5′ of a region of interest of said nucleic acid of interest and the B′ sequence positioned at 3′ of the region of interest of said nucleic acid of interest, and
[0186] a sixth single-stranded molecule comprising
[0187] in its 5′ part, at least one complementary sequence of said fifth sequence for recognizing said transposase of the first molecule,
[0188] in its 3′ part, at least one complementary sequence of said fourth sequence for recognizing said transposase of the second molecule, and
[0189] an intermediate region located between the complementary sequence of said fourth recognition sequence of said transposase of the first molecule and the complementary sequence of said fifth recognition sequence of said transposase of the second molecule, said intermediate region comprising a sequence that is antiparallel and complementary to the sequence coding for the interleukin-2 receptor gamma or IL2-Rγ contained in the third molecule of the first composition,

[0190] the fourth and sixth single-stranded nucleic acid molecules being paired according to the base complementarity defined by Watson and Crick so as to define two double-stranded binding sites of said transposase, and the fifth and sixth single-stranded nucleic acid molecules being paired according to the base complementarity defined by Watson and Crick so as to define two double-stranded binding sites of said transposase.

[0191] Advantageously, the composition according to the invention comprises 6 molecules, that is, two triplets enabling double-stranded replacement of a target molecule. This replacement can only take place if the regions A, B and A′ and B′ are correctly chosen, so that the region of interest to be replaced is correctly framed.

[0192] Of course, all the definitions given for a 3-molecule composition apply mutatis mutandis to a 6-molecule composition.

[0193] Advantageously, the invention relates to the composition described above, wherein
[0194] said A sequence comprises a sequence complementary to the sequence of a first region of the gene coding for IL2-Rγ,
[0195] said B sequence comprises a sequence complementary to the sequence of a second region of the gene coding for IL2-Rγ,

[0196] said A sequence and said B sequence being two different sequences, said first and second regions of the gene coding for IL2-Rγ, framing a region comprising a sequence coding for a portion of IL2-Rγ, or coding for the complete IL2-Rγ receptor, wherein
[0197] said A′ sequence comprises a sequence complementary to the sequence of a third region of the gene coding for IL2-Rγ,
[0198] said B′ sequence comprises a sequence complementary to the sequence of a fourth region of the gene coding for IL2-Rγ,

[0199] said A′ sequence and said B′ sequence being two different sequences, said third and fourth regions of the gene coding for IL2-Rγ, framing a region comprising a sequence coding for a portion of IL2-Rγ, or coding for the complete IL2-Rγ receptor,

[0200] and wherein

[0201] the A sequence and the A′ sequence are at most partially complementary,

[0202] the A sequence and the B′ sequence are at most partially complementary,

[0203] the B sequence and the A′ sequence are at most partially complementary, and

[0204] the B sequence and the B′ sequence are at most partially complementary.

[0205] “At most partially complementary” within the invention means that the sequences possess sequences that are capable of pairing according to the base complementarity defined by Watson and Crick, but not on all of the sequences. In other words, only part of the sequence is complementary. Advantageously, the sequences A, A′, B and B′ are partially complementary on less than 50% of the sequences, in particular less than 30% of the sequences, in particular less than 10% of the sequences, in particular are not complementary to each other at all.

[0206] In this way, it is possible to frame the gene coding for the IL2-Rγ receptor in a specific and oriented way, for both strands, in order to avoid disordered or inconsistent recombinations (that is, tagmentations) so that the result would not be as expected.

[0207] Even more advantageously, the above-mentioned composition comprises at least one of the sextuplets mentioned in the following Table 3:

TABLE 3

| | First | Second | Third | Fifth | Fourth | Sixth |
|---|---|---|---|---|---|---|
| | molecule | molecule | molecule | molecule | molecule | molecule |
| | SEQ | SEQ | SEQ | SEQ | SEQ | SEQ |
| Sextuplet | ID NO: | ID NO: | ID NO: | ID NO: | ID NO: | ID NO: |
| #1 | 198 | 199 | 200 | 201 | 202 | 203 |
| #2 | 204 | 205 | 206 | 207 | 208 | 209 |
| #3 | 210 | 211 | 212 | 213 | 214 | 215 |
| #4 | 216 | 217 | 218 | 219 | 220 | 221 |
| #5 | 222 | 223 | 224 | 225 | 226 | 227 |
| #6 | 228 | 229 | 230 | 231 | 232 | 233 |
| #7 | 234 | 235 | 236 | 237 | 238 | 239 |
| #8 | 240 | 241 | 242 | 243 | 244 | 245 |
| #9 | 246 | 247 | 248 | 249 | 250 | 251 |
| #10 | 252 | 253 | 254 | 255 | 256 | 257 |
| #11 | 258 | 259 | 260 | 261 | 262 | 263 |
| #12 | 264 | 265 | 266 | 267 | 268 | 269 |
| #13 | 270 | 271 | 272 | 273 | 274 | 275 |
| #14 | 276 | 277 | 278 | 279 | 280 | 281 |
| #15 | 282 | 283 | 284 | 285 | 286 | 287 |
| #16 | 288 | 289 | 290 | 291 | 292 | 293 |
| #17 | 294 | 295 | 296 | 297 | 298 | 299 |
| #18 | 300 | 301 | 302 | 303 | 304 | 305 |
| #19 | 306 | 307 | 308 | 309 | 310 | 311 |
| #20 | 312 | 313 | 314 | 315 | 316 | 317 |
| #21 | 318 | 319 | 320 | 321 | 322 | 323 |
| #22 | 324 | 325 | 326 | 327 | 328 | 329 |
| #23 | 330 | 331 | 332 | 333 | 334 | 335 |
| #24 | 336 | 337 | 338 | 339 | 340 | 341 |
| #25 | 342 | 343 | 344 | 345 | 346 | 347 |
| #26 | 348 | 349 | 350 | 351 | 352 | 353 |
| #27 | 354 | 355 | 356 | 357 | 358 | 359 |
| #28 | 360 | 361 | 362 | 363 | 364 | 365 |
| #29 | 366 | 367 | 368 | 369 | 370 | 371 |
| #30 | 372 | 373 | 374 | 375 | 376 | 377 |
| #31 | 378 | 379 | 380 | 381 | 382 | 383 |
| #32 | 384 | 385 | 386 | 387 | 388 | 389 |
| #33 | 390 | 391 | 392 | 393 | 394 | 395 |
| #34 | 396 | 397 | 398 | 399 | 400 | 401 |
| #35 | 402 | 403 | 404 | 405 | 406 | 407 |
| #36 | 408 | 409 | 410 | 411 | 412 | 413 |
| #37 | 414 | 415 | 416 | 417 | 418 | 419 |
| #38 | 420 | 421 | 422 | 423 | 424 | 425 |
| #39 | 426 | 427 | 428 | 429 | 430 | 431 |
| #40 | 432 | 433 | 434 | 435 | 436 | 437 |
| #41 | 438 | 439 | 440 | 441 | 442 | 443 |
| #42 | 444 | 445 | 446 | 447 | 448 | 449 |
| #43 | 450 | 451 | 452 | 453 | 454 | 455 |
| #44 | 456 | 457 | 458 | 459 | 460 | 461 |
| #45 | 462 | 463 | 464 | 465 | 466 | 467 |
| #46 | 468 | 469 | 470 | 471 | 472 | 473 |
| #47 | 474 | 475 | 476 | 477 | 478 | 479 |
| #48 | 480 | 481 | 482 | 483 | 484 | 485 |
| #49 | 486 | 487 | 488 | 489 | 490 | 491 |
| #50 | 492 | 493 | 494 | 495 | 496 | 497 |
| #51 | 498 | 499 | 500 | 501 | 502 | 503 |
| #52 | 504 | 505 | 506 | 507 | 508 | 509 |
| #53 | 510 | 511 | 512 | 513 | 514 | 515 |
| #54 | 516 | 517 | 518 | 519 | 520 | 521 |
| #55 | 522 | 523 | 524 | 525 | 526 | 527 |
| #56 | 528 | 529 | 530 | 531 | 532 | 533 |
| #57 | 534 | 535 | 536 | 537 | 538 | 539 |
| #58 | 540 | 541 | 542 | 543 | 544 | 545 |
| #59 | 546 | 547 | 548 | 549 | 550 | 551 |
| #60 | 552 | 553 | 554 | 555 | 556 | 557 |
| #61 | 558 | 559 | 560 | 561 | 562 | 563 |
| #62 | 564 | 565 | 566 | 567 | 568 | 569 |
| #63 | 570 | 571 | 572 | 573 | 574 | 575 |
| #64 | 576 | 577 | 578 | 579 | 580 | 581 |
| #65 | 582 | 583 | 584 | 585 | 586 | 587 |
| #66 | 588 | 589 | 590 | 591 | 592 | 593 |
| #67 | 594 | 595 | 596 | 597 | 598 | 599 |
| #68 | 600 | 601 | 602 | 603 | 604 | 605 |
| #69 | 606 | 607 | 608 | 609 | 610 | 611 |
| #70 | 612 | 613 | 614 | 615 | 616 | 617 |
| #71 | 618 | 619 | 620 | 621 | 622 | 623 |
| #72 | 624 | 625 | 626 | 627 | 628 | 629 |
| #73 | 630 | 631 | 632 | 633 | 634 | 635 |
| #74 | 636 | 637 | 638 | 639 | 640 | 641 |
| #75 | 642 | 643 | 644 | 645 | 646 | 647 |
| #76 | 648 | 649 | 650 | 651 | 652 | 653 |
| #77 | 654 | 655 | 656 | 657 | 658 | 659 |
| #78 | 660 | 661 | 662 | 663 | 664 | 665 |
| #79 | 666 | 667 | 668 | 669 | 670 | 671 |
| #80 | 672 | 673 | 674 | 675 | 676 | 677 |
| #81 | 678 | 679 | 680 | 681 | 682 | 683 |
| #82 | 684 | 685 | 686 | 687 | 688 | 689 |
| #83 | 690 | 691 | 692 | 693 | 694 | 695 |
| #84 | 696 | 697 | 698 | 699 | 700 | 701 |
| #85 | 702 | 703 | 704 | 705 | 706 | 707 |
| #86 | 708 | 709 | 710 | 711 | 712 | 713 |
| #87 | 714 | 715 | 716 | 717 | 718 | 719 |
| #88 | 720 | 721 | 722 | 723 | 724 | 725 |
| #89 | 726 | 727 | 728 | 729 | 730 | 731 |
| #90 | 732 | 733 | 734 | 735 | 736 | 737 |
| #91 | 738 | 739 | 740 | 741 | 742 | 743 |
| #92 | 744 | 745 | 746 | 747 | 748 | 749 |
| #93 | 750 | 751 | 752 | 753 | 754 | 755 |
| #94 | 756 | 757 | 758 | 759 | 760 | 761 |
| #95 | 762 | 763 | 764 | 765 | 766 | 767 |
| #96 | 768 | 769 | 770 | 771 | 772 | 773 |
| #97 | 774 | 775 | 776 | 777 | 778 | 779 |
| #98 | 780 | 781 | 782 | 783 | 784 | 785 |
| #99 | 786 | 787 | 788 | 789 | 790 | 791 |
| #100 | 792 | 793 | 794 | 795 | 796 | 797 |
| #101 | 798 | 799 | 800 | 801 | 802 | 803 |
| #102 | 804 | 805 | 806 | 807 | 808 | 809 |
| #103 | 810 | 811 | 812 | 813 | 814 | 815 |
| #104 | 816 | 817 | 818 | 819 | 820 | 821 |
| #105 | 822 | 823 | 824 | 825 | 826 | 827 |
| #106 | 828 | 829 | 830 | 831 | 832 | 833 |
| #107 | 834 | 835 | 836 | 837 | 838 | 839 |
| #108 | 840 | 841 | 842 | 843 | 844 | 845 |
| #109 | 846 | 847 | 848 | 849 | 850 | 851 |
| #110 | 852 | 853 | 854 | 855 | 856 | 857 |
| #111 | 858 | 859 | 860 | 861 | 862 | 863 |
| #112 | 864 | 865 | 866 | 867 | 868 | 869 |
| #113 | 870 | 871 | 872 | 873 | 874 | 875 |
| #114 | 876 | 877 | 878 | 879 | 880 | 881 |
| #115 | 882 | 883 | 884 | 885 | 886 | 887 |
| #116 | 888 | 889 | 890 | 891 | 892 | 893 |
| #117 | 894 | 895 | 896 | 897 | 898 | 899 |
| #118 | 900 | 901 | 902 | 903 | 904 | 905 |
| #119 | 906 | 907 | 908 | 909 | 910 | 911 |
| #120 | 912 | 913 | 914 | 915 | 916 | 917 |
| #121 | 918 | 919 | 920 | 921 | 922 | 923 |
| #122 | 924 | 925 | 926 | 927 | 928 | 929 |
| #123 | 930 | 931 | 932 | 933 | 934 | 935 |
| #124 | 936 | 937 | 938 | 939 | 940 | 941 |
| #125 | 942 | 943 | 944 | 945 | 946 | 947 |
| #126 | 948 | 949 | 950 | 951 | 952 | 953 |
| #127 | 954 | 955 | 956 | 957 | 958 | 959 |
| #128 | 960 | 961 | 962 | 963 | 964 | 965 |
| #129 | 966 | 967 | 968 | 969 | 970 | 971 |
| #130 | 972 | 973 | 974 | 975 | 976 | 977 |
| #131 | 978 | 979 | 980 | 981 | 982 | 983 |
| #132 | 984 | 985 | 986 | 987 | 988 | 989 |
| #133 | 990 | 991 | 992 | 993 | 994 | 995 |
| #134 | 996 | 997 | 998 | 999 | 1000 | 1001 |
| #135 | 1002 | 1003 | 1004 | 1005 | 1006 | 1007 |
| #136 | 1008 | 1009 | 1010 | 1011 | 1012 | 1013 |
| #137 | 1014 | 1015 | 1016 | 1017 | 1018 | 1019 |
| #138 | 1020 | 1021 | 1022 | 1023 | 1024 | 1025 |
| #139 | 1026 | 1027 | 1028 | 1029 | 1030 | 1031 |
| #140 | 1032 | 1033 | 1034 | 1035 | 1036 | 1037 |
| #141 | 1038 | 1039 | 1040 | 1041 | 1042 | 1043 |
| #142 | 1044 | 1045 | 1046 | 1047 | 1048 | 1049 |
| #143 | 1050 | 1051 | 1052 | 1053 | 1054 | 1055 |
| #144 | 1056 | 1057 | 1058 | 1059 | 1060 | 1061 |
| #145 | 1062 | 1063 | 1064 | 1065 | 1066 | 1067 |
| #146 | 1068 | 1069 | 1070 | 1071 | 1072 | 1073 |
| #147 | 1074 | 1075 | 1076 | 1077 | 1078 | 1079 |
| #148 | 1080 | 1081 | 1082 | 1083 | 1084 | 1085 |
| #149 | 1086 | 1087 | 1088 | 1089 | 1090 | 1091 |
| #150 | 1092 | 1093 | 1094 | 1095 | 1096 | 1097 |
| #151 | 1098 | 1099 | 1100 | 1101 | 1102 | 1103 |
| #152 | 1104 | 1105 | 1106 | 1107 | 1108 | 1109 |
| #153 | 1110 | 1111 | 1112 | 1113 | 1114 | 1115 |
| #154 | 1116 | 1117 | 1118 | 1119 | 1120 | 1121 |
| #155 | 1122 | 1123 | 1124 | 1125 | 1126 | 1127 |
| #156 | 1128 | 1129 | 1130 | 1131 | 1132 | 1133 |

[0208] The composition according to the invention thus advantageously offers 156 sextuplets of molecules enabling a potentially mutated or abnormal sequence to be replaced by the reference wild-type sequence at the locus of the IL2R geneγ.

[0209] Depending on the target cell, this makes it possible to restore a function lost through mutation, and to achieve functional complementation.

[0210] In another aspect, the invention relates to a pharmaceutical composition comprising the above-mentioned composition, in association with a pharmaceutically acceptable vehicle.

[0211] The above-mentioned composition, in association with a pharmaceutically acceptable vehicle, can be used in the treatment of pathologies. The vehicle is a commonly accepted vehicle known to the person skilled in the art, such as distilled water or a physiological buffer. This vehicle must allow the formation of a complex as mentioned above, but also be acceptable to a cell or living being.

[0212] In another aspect, the invention relates to the above-mentioned composition, for use as a medicament.

[0213] Moreover, it is advantageous for the composition comprising any of the triplets in Table 2, or any of the sextuplets in Table 3, to be used as a medicament.

[0214] In yet another aspect, the invention concerns a composition for use in the treatment of pathologies linked to a mutation in the gene coding for IL2-Rγ.

[0215] Mutations in the IL2Rγ gene are widely described in the literature, and may correspond to substitutions, insertions or deletions affecting either an exon, an intron or the 5′ or 3′ regulatory regions of the gene.

[0216] More particularly, the invention concerns a composition for use in the treatment of pathologies linked to a mutation in the gene coding for IL2-Rγ, said composition comprising a triplet as mentioned in table 2 or a sextuplet as mentioned in table 3.

[0217] Advantageously, the invention relates to the composition for its aforementioned use, where the disease associated with a mutation in the gene coding for IL2-Rγ is SCID-X disease or Omenn syndrome.

[0218] Severe combined immunodeficiency (SCID) T-B+ by gamma chain deficiency, also known as SCIDX1 or SCID-X, is a form of SCID characterized by severe and recurrent infections associated with diarrhea and stunted growth.

[0219] During the first months of life, SCIDX1 manifests itself in severe and often fatal viral, bacterial or fungal infections (e.g. Pneumocystis jiroveci pneumonitis, disseminated BCG infection secondary to vaccination) and stunted growth. Chronic diarrhea is a frequent feature. Some patients experience skin rashes and liver function abnormalities. Graft-versus-host disease, linked to maternal-fetal transmission, is also associated with the disease. Immunological results reveal lymphopenia with absence of T or NK lymphocytes, hypogammaglobulinemia, and normal or elevated B lymphocyte counts.

[0220] Omenn syndrome is an inflammatory disorder characterized by erythroderma, desquamation, alopecia, chronic diarrhea, staturo-ponderal growth retardation, adenopathy and hepatosplenomegaly, associated with severe combined immunodeficiency. Omenn syndrome appears in the first year of life, with manifestations characteristic of severe combined immunodeficiency, including chronic diarrhea, pneumonitis and staturo-ponderal growth retardation. Patients also present inflammatory symptoms such as adenopathy, hepatosplenomegaly and generalized erythroderma, often leading to alopecia and loss of eyebrows and eyelashes. Protein loss can lead to generalized edema and metabolic disorders. Signs and symptoms may evolve over time and may appear separately. Some patients manifest only certain symptoms, and can be described as cases of Atypical Omenn Syndrome. Rather than a distinct form of severe combined immunodeficiency, it is more an inflammatory phenotype that can be associated with different types of severe combined immunodeficiency. Most cases reported to date feature hypomorphic mutations in the RAG1 and RAG2 (11p13) genes. Other mutations occur in the RMRP, ADA and IL2Rγ genes, as well as others.

[0221] In another aspect, the invention relates to a method of treating SCID-X or Omenn syndrome, said method comprising administering an effective amount of an aforementioned composition to an individual in need, said composition notably comprising a triplet as defined in Table 2 or a sextuplet as defined in Table 3.

[0222] In yet another aspect, the invention relates to the use of a composition as defined above, for the substitution, in a somatic cell, of a mutated sequence of the gene coding for IL2-Rγ by a wild-type sequence of the gene coding wild-type IL2-Rγ, with the proviso that the use does not comprise a method for the modification of the germline genetic identity of human beings and that said use is not a method for the treatment of the human or animal body by surgery or therapy.

[0223] As explained hereinbefore, the aforementioned composition makes it possible to target specifically a target region and to replace it with a sequence of interest, by using the transposase tagmentation properties.

[0224] The composition according to the invention is particularly advantageous for carrying out targeted gene modifications (and in particular gene replacements, or replacements of non-coding sequences) in humans and in particular for replacing the mutated IL2Rγ gene with its wild-type reference sequence.

[0225] In yet another advantageous embodiment, the invention relates to a method of replacing, in particular in vitro, a mutated sequence of the gene coding for IL2-Rγ with a wild-type sequence coding for IL2-Rγ, said method comprising:
[0226] bringing a composition as defined above into contact with the nucleic acid comprising the mutated sequence coding for the IL2-Rγ gene,

[0227] said composition being such that

[0228] the A sequence of said first molecule comprises a complementary sequence of the region immediately at 5′ of the mutated sequence coding for the IL2-Rγ gene,

[0229] the B sequence of said second molecule comprises a complementary sequence of the region immediately at 3′ of the mutated sequence coding for the IL2-Rγ gene, and

[0230] the third molecule comprises the wild-type sequence of the gene coding for IL2-Rγ, located between a complementary sequence of said second sequence for recognizing said transposase of the first molecule and the complementary sequence of said first sequence for recognizing said transposase of the second molecule, in order to obtain a replacement complex,
[0231] placing the replacement complex in the presence of a transposase recognizing the double-stranded binding sites of said transposase contained in said ensemble, to obtain a recombination complex, and
[0232] recombining the combination complex to obtain the hybrid nucleic acid molecule the wild-type sequence of the gene coding for IL2-Rγ, in place of the mutated sequence of the gene coding for IL2-Rγ.

[0233] Advantageously, the invention relates to a method of replacing, in particular in vitro, a mutated sequence of the gene coding for IL2-Rγ with a wild-type sequence coding for IL2-Rγ, said method comprising:
[0234] bringing a composition comprising a triplet as defined in Table 2 or a sextuplet as defined in Table 3, into contact with nucleic acid comprising the mutated sequence coding for the IL2-Rγ gene, to obtain a replacement complex,
[0235] placing the replacement complex in the presence of a transposase recognizing the double-stranded binding sites of said transposase contained in said ensemble, to obtain a recombination complex, and
[0236] recombining the combination complex to obtain the hybrid nucleic acid molecule the wild-type sequence of the gene coding for IL2-Rγ, in place of the mutated sequence of the gene coding for IL2-Rγ.

[0237] In yet another aspect, the invention relates to a method for in vitro replacement of a mutated double-stranded sequence of the gene coding for IL2-Rγ of a stem cell, in particular a hematopoietic stem cell, by a wild-type double-stranded sequence coding for IL2-Rγ, said method comprising:
[0238] bringing a composition as defined above into contact with the hematopoietic stem cell comprising the mutated sequence coding for the IL2-Rγ gene,

[0239] said ensemble being such that

[0240] the A sequence of said first molecule comprises a complementary sequence of the region immediately at 5′ of the mutated sequence coding for the IL2-Rγ gene,

[0241] the A′ sequence of said fourth molecule comprises a complementary sequence of the region immediately at 5′ of the mutated complementary sequence coding for the IL2-Rγ gene,

[0242] the B sequence of said second molecule comprises a complementary sequence of the region immediately at 3′ of the mutated sequence coding for the IL2-Rγ gene, the B′ sequence of said second molecule comprises a complementary

[0243] sequence of the region immediately at 3′ of the mutated complementary sequence coding for the IL2-Rγ gene, and

[0244] the third molecule comprises the wild-type sequence of the gene coding for IL2-Rγ, located between a complementary sequence of said second sequence for recognizing said transposase of the first molecule and the complementary sequence of said first sequence for recognizing said transposase of the second molecule,

[0245] the sixth molecule comprises the sequence complementary to the wild-type sequence of the gene coding for IL2-Rγ, located between a complementary sequence of said second sequence for recognizing said transposase of the first molecule and the complementary sequence of said first sequence for recognizing said transposase of the second molecule, in order to obtain a replacement complex,
[0246] placing the replacement complex in the presence of a transposase recognizing the double-stranded binding sites of said transposase contained in said composition, to obtain a recombination complex, and
[0247] recombining the combination complex to obtain the hybrid nucleic acid molecule the wild-type sequence of the gene coding for IL2-Rγ, in place of the mutated sequence of the gene coding for IL2-Rγ,
[0248] and possibly purification of hematopoietic stem cells with mutated gene replacement.

[0249] Advantageously, the invention relates to a method for in vitro replacement of a mutated double-stranded sequence of the gene coding for IL2-Rγ of a stem cell, in particular a hematopoietic stem cell, by a wild-type double-stranded sequence coding for IL2-Rγ, said method comprising:
[0250] contacting a composition as defined above with the hematopoietic stem cell comprising the mutated sequence coding for the IL2-Rγ gene to obtain a replacement complex, said composition comprising a triplet as defined in Table 2 or a sextuplet as defined in Table 3,
[0251] placing the replacement complex in the presence of a transposase recognizing the double-stranded binding sites of said transposase contained in said composition, to obtain a recombination complex, and
[0252] recombining the combination complex to obtain the hybrid nucleic acid molecule the wild-type sequence of the gene coding for IL2-Rγ, in place of the mutated sequence of the gene coding for IL2-Rγ,
[0253] and possibly purification of hematopoietic stem cells with mutated gene replacement.

[0254] In yet another aspect, the invention relates to a method of inserting, in particular in vitro, a double-stranded sequence of the wild-type gene coding for IL2-Rγ into a cell, in particular a stem cell, in particular a hematopoietic stem cell, at the locus of the gene coding for IL2-Rγ, wherein said locus of the gene coding for IL2-Rγ comprises a mutation affecting the expression, the function, or both, of IL2-Rγ,

[0255] wherein said double-stranded sequence of the wild-type gene coding for IL2-Rγ corresponds to the cDNA of said gene, in particular the sequence SEQ ID NO: 3,

[0256] said method comprising:
[0257] brining a composition as defined in any one of claims 1 to 9 into contact with the cell comprising a mutation affecting the expression, function or both of IL2-Rγ, at the locus of the gene coding for IL2-Rγ said composition being such that

[0258] the A sequence of said first molecule comprises a complementary sequence of the region at 5′ of exon 1 of the gene coding for IL2-Rγ,

[0259] the A′ sequence of said fourth molecule comprises a complementary sequence of the complementary sequence of the region at 5′ of exon 1 of the gene coding for IL2-Rγ,

[0260] the B sequence of said second molecule comprises a complementary sequence at 3′ of the region at 5′ of exon 1 of the gene coding for IL2-Rγ,

[0261] the B′ sequence of said fifth molecule comprises a complementary sequence at 3′ of the complementary sequence of the region at 5′ of exon 1 of the gene coding for IL2-Rγ, and

[0262] the third molecule comprises the wild-type cDNA sequence of the gene coding for IL2-Rγ, located between a complementary sequence of said second sequence for recognizing said transposase of the first molecule and the complementary sequence of said first sequence for recognizing said transposase of the second molecule,

[0263] the sixth molecule comprises the wild-type cDNA sequence of the gene coding for IL2-Rγ, located between a complementary sequence of said second sequence for recognizing said transposase of the first molecule and the complementary sequence of said first sequence for recognizing said transposase of the second molecule,

[0264] to obtain a replacement complex,
[0265] placing the replacement complex in the presence of a transposase
[0266] recognizing the double-stranded binding sites of said transposase contained in said ensemble, to obtain a recombination complex, and
[0267] recombining the combination complex to obtain insertion of the cDNA of the gene coding for IL2-Rγ 5′ to exon 1 of the gene coding for IL2-Rγ,
[0268] and, if necessary, purification of the inserted cell.

### EXAMPLES

### Example 1—Obtaining B Cells Expressing the Wild-Type ILR2G Gene

[0269] In order to treat patients suffering from SCID-X, involving a mutation in the ILR2G gene, it may be advantageous to propose a cell therapy aimed at transplanting into patients CD34+ hematopoietic stem cells that have been modified using a composition according to the invention, notably to replace the mutated ILR2G gene with the wild-type sequence of said gene.

A—Purifying CD34+ Hematopoietic Stem Cells (HSC) from Blood

[0270] Purification of CD34+ cells is well known to the person skilled in the art, and can be summarized as follows:
[0271] 1—Donor blood samples (adult or umbilical cord blood rich in CD34+ cells) are collected, fresh or frozen (it is also possible to purify CD34+ cells from a patient with DISC-X);
[0272] 2—Samples are centrifuged at 1000 g for 8 min without brake on sterile density gradient centrifugation medium (e.g. Ficoll in the presence of EDTA) to isolate Peripheral Blood Mononuclear Cells (PBMC);
[0273] 3—The white blood cell rings are collected and washed with PBS (Phosphate Buffered Saline);
[0274] 4—Hematopoietic stem cells (that is, CD34+ cells) are then isolated in a cell sorter by positive selection using anti-CD34 antibody labeling or by negative selection using a cocktail of anti-CD2, anti-CD3, anti-CD14, anti-CD16, anti-CD19, anti-CD24, anti-CD56n, anti-CD66b and anti-CD61 antibodies;
[0275] 5—Purified CD34+ cells are centrifuged at 300 g for 5 min and the cell pellets are suspended at a cell density of 100,000 to 300,000 cells/mL and cultured at 37° C. and 5% CO₂ for 48 h in 24-well plates at a rate of 1 mL per well in a culture medium specifically dedicated to stem cell culture and supplemented with a cocktail containing human IL-3, human IL-6, recombinant thrombopoietin, recombinant hCSF (ligand Kit) and recombinant Flt-3 ligand, at 100 ng/ml each.
[0276] 6—the CD34+ stem cells are thus ready to be transfected with the composition according to the invention.

### B—Preparing the Molecules of the Composition According to the Invention

[0277] To target the IL2R geneγ, and verify insertion at the IL2R locusγ chrX:70,327,254-70,331,958 GRCh37/hg19, a construct comprising GFP was prepared.

[0278] Two tubes were prepared as follows:
[0279] Tube 1 (10 μL):
[0280] oligo Great X1 (10 μM) corresponding to molecule 1 of sequence SEQ ID: 198 and on

5′-
AgaTgTGtatAAGAGaCAGGTAGTGTATTTTTTTTTTTTTTTTTATCAT
CCTGtCTCTTataCAcAtcTTTTTTTTTTTTTTTTTTTTTTTGGCGATC
GCTTTTTTTTTTTTTTTTGCTAGAAAGAGTACTGTTCTGGAAACTGACT
TTTTTTTTTTTTTTTGCGATCGCCTTTTTTTTTTTTTGATACATTTAga
TgTGtatAAGAGaCAGGATGAT-3′

[0281] oligo Great X3 (10 UM) corresponding to molecule 4 of sequence SEQ ID: 201 and on

5′-CACGTGCTGtCTCTTataCAcAtcTTTTCTCGATCATTATTATTTT
TTGGCGATCGCTTTTTTTTTTTTTTTTAGCAAATTGGTAATACTCCTGC
CTCCACAGTTTTTTTTTTTTTTTTGCGATCGCCTTTTTTTTTTTTTTTT
TTTTTAgaTgTGtatAAGAGaCAGCACGTGTTTTTTTTTTTTTTTTTTT
TCAGCTATACTGtCTCTTataCAcAtcT-3′

[0282] GREAT X1 Rev reverse oligo (10 μM) corresponding to the 5′ part of molecule 3 with sequence SEQ ID NO: 1134 and on

5′-
TACACTACCTGtCTCTTataCAcAtcTTTTTTTTTTTTTTTTTTTTTTT
ggttacATGCATCGTACA-3′

[0283] GREAT X3 Rev reverse oligo (10 μM) corresponding to the 3′ part of molecule 6 with sequence SEQ ID NO: 1135 and on

5′-
TGTACGATGCATgtaaccTTTTTTTTTTTTTTTTTTTTTTTAgaTgTGt
atAAGAGaCAGTATAGCTG-3′

[0284] the Reverse Helix Rev oligo corresponding to an additional strand for binding a helicase via the biotinylated 3′ end, the oligo having the sequence SEQ ID NO: 1136 and on

5′-ATAATAATGATCGAGAACTTTTTTTTTTTTTTTTTTTTTTTTTTTT
T[Biot]-3′

[0285] Tube 2 (10 μL):
[0286] oligo Great X2 (10 UM) corresponding to molecule 2 of sequence SEQ ID NO: 199 and on

5′-CACGTGCTGtCTCTTataCAcAtcTTTTCTCGATCATTATTATTTT
TTGGCGATCGCTTTTTTTTTTTTTTTTGTTGAGAATGGTGCTAGTGGTA
GTGAACAGTTTTTTTTTTTTTTTTGCGATCGCCTTTTTTTTTTTTTTTT
TTTTTAgaTgTGtatAAGAGaCAGCACGTGTTTTTTTTTTTTTTTTTTT
TGACGAATACTGtCTCTTataCAcAtcT-3′

[0287] oligo Great X4 (10 μM) corresponding to molecule 5 of sequence SEQ ID NO: 202 and on:

5′-
AgaTgTGtatAAGAGaCAGAGTATGAATTTTTTTTTTTTTTTTTATCAT
CCTGtCTCTTataCAcAtcTTTTTTTTTTTTTTTTTTTTTTTGGCGATC
GCTTTTTTTTTTTTTTTTCCTTCTCCTCTAAATCATTACCTTCTATAAT
TTTTTTTTTTTTTTTGCGATCGCCTTTTTTTTTTTTTGATACATTTAga
TgTGtatAAGAGaCAGGATGAT-3′

[0288] GREAT X2 Rev reverse oligo (10 μM) corresponding to the 3′ part of molecule 3 with sequence SEQ ID NO: 1137 and on

5′-CGATACgcggccgcatgttcTTTTTTTTTTTTTTTTTTTTTTTAga
TgTGtatAAGAGaCAGTATTCGTC-3′

[0289] GREAT X4 Rev reverse oligo (10 μM) corresponding to the 5′ part of molecule 6 with sequence SEQ ID NO: 1138 and on

5′-TTCATACTCTGtCTCTTataCAcAtcTTTTTTTTTTTTTTTTTgaa
catgcggccgcGTATCG-3′

[0290] the Reverse Helix Rev oligo corresponding to an additional strand for binding a helicase via the biotinylated 3′ end, the oligo having the sequence SEQ ID NO: 1136.

[0291] The two tubes are then heated to 95° C. for 5 min and then left for 1 hour at room temperature, then each tube is digested with the corresponding restriction enzymes: Tube 1: NsiI and Tube 2: NotI then purified by PCR purification kit (elution 20 μL).

[0292] FIGS. 4 and 5 schematically show the contents of tubes 1 and 2 respectively before enzymatic digestion.

[0293] In parallel, an amplified GFP-ILR2γ sequence was obtained via lysis of HEK293T cells and genomic DNA extraction protocol and amplification of the locus of interest via hyper-processive Taq PCR. This sequence was amplified (using oligonucleotides with a 5′ NsiI restriction site and a 3′ NotI restriction site). The PCR product was digested by the two enzymes and purified by PCR purification kit eluted at a volume of 20 μL. The GFP-ILR2γ fusion is then flanked (that is, free NsiI and NotI half-sites) in tube 3.

[0294] The contents of the 3 tubes (tube 1, tube 2 and tube 3) are then mixed and T4 phage ligase is added to the mixture (4 μL, 100 U) in the presence of appropriate buffer (T4 buffer; 5 μL 10×) and 11 μL of distilled water. The mixture is left for 1 hour at room temperature. The mixture is then gel-purified (30 μL elution) to isolate the largest fragment, GFP-ILR2γ, with a size greater than 1 kbase.

[0295] The purified fragment is ready for use and includes the first, second, fourth and fifth molecules at the ends, the third and sixth corresponding to the GFP IL2Rγ fusion (tube 4).

[0296] At this stage, the modified single-stranded oligonucleotide complementary to part of the first and fourth molecules, with the 3′ part of the complementary modified single-stranded oligonucleotide coupled to biotin (biotinylated oligo), was added. This biotinylated molecule is not mandatory.

C—Transfection of CD34+ Cells with the Composition According to the Invention.

[0297] The contents of tube 4, containing biotinylated or non-biotinylated oligo, are then used to transfect isolated CD34+ cells by electroporation.

[0298] The cells are centrifuged at 300 g for 5 min and washed with PBS before being suspended in electrolyte buffer at a cell density of 75,000 to 100,000 cells per electroporation chamber. The contents of tube 4, together with a plasmid coding for the Tn5 protein, and optionally a plasmid coding a helicase-streptavidin fusion (UVRD-mSA), are added to the electroporation chamber according to the “Episomal iPSC Reprogramming Vectors” protocol of Thermofisher's Neon® Transfert System transfection system.

[0299] The mixture is electroporated at 1650 V in three 10 ms sequences.

[0300] The cells are then immediately centrifuged at 300 g for 5 min and suspended in supplemented stem cell culture medium for 48 to 96 h at 37° C. and 5% CO₂.

[0301] Tagmentation (that is, gene replacement) is then possible. The cells are maintained in a suitable culture medium.

### D—Transfection Verification

[0302] Transfected cells with the molecule of interest inserted at the locus are selected using an antibiotic whose resistance gene is contained in the replacement sequence (e.g. neomycin, bleomycin, blasticidin S etc.).

[0303] Genomic DNA from transfected and resistant cells is extracted and fragmented by sonication, then sequencing adapters are added. PCR amplification of all genomic DNA fragments is performed. This library was sequenced on a sequencer (50×8×50 reads on a HiSeq 2500, paired-end) and the results compiled by mapping and alignment via bwa-mem module (hg19 bank). On-target/off-target analysis was performed by specific selection and cluster read via comparison with reference genome (hg19) by mapping with the Bwa-mem module in short reads mode and the minimap2 module. Peak insertion data were assembled using the macs2 module.

[0304] It is also possible to perform a simple PCR using a sense oligonucleotide 5′ from the insertion and an antisense oligonucleotide 3′ from the insertion (Single-Tail Adapter/Tag (STAT)-PCR based method). The PCR product is then sequenced using conventional techniques, in order to detect in the region of interest at least the presence of GFP, a sign of fusion insertion.

### E—Functional Analysis of CD34+ Cells Modified by the Composition According to the Invention

[0305] Differentiation of modified CD34+ cells is monitored in vitro using the OP9-DL1 or DL4 murine stromal cell coculture model as described in the literature.

[0306] Briefly, OP9-DL1 or DL4 cells are cultured with modified CD34 cells for 14 days at 37° C. at 5% CO₂ and 10% O₂ in MEM (Minimum Essential Medium) supplemented with 10% SVF (Fetal Calf Serum), the cytokine cocktail required for CD34 cell culture (as described above) and a cytokine cocktail promoting activation of myelo-erythroid and lymphoid differentiation pathways.

[0307] After 2 weeks in culture, the differentiated CD34+ cells are collected and analyzed by flow cytometry to observe their hematopoietic differentiation profile using anti-CD19 (B lymphoid lineage) antibodies, anti-CD3 (T lymphoid lineage), anti-CD56 (NK lineage), anti-CD16 (monocyte/macrophage lineage), anti-CD14 (macrophage/neutrophil lineage), anti-CD11c (myeloid lineage) and anti-CD235a (erythroid lineage).

[0308] Differentiation of modified CD34+ cells is also monitored in vivo using the NSG or NOD SCID mouse model (immunodeficient mice).

[0309] Modified CD34+ cells are injected IH (intrahepatic) or IF (intrafemoral) into 3-4-day-old or 6-8-week-old mice.

[0310] Differentiation is monitored at 8 weeks, 12 weeks and 16 weeks post-injection, in the bone marrow, spleen and blood of mice. Human cells are analyzed by flow cytometry using anti-CD45 and anti-HLA ABC antibodies, and their cellular profile is analyzed using the same panel of antibodies as used in vitro.

[0311] For each cell type, GFP expression can be detected by flow cytometry.

[0312] For differentiated cells, reverse transcription can also be performed on isolated cells to obtain a cDNA library. Amplification of the GFP and ILR2Y sequence is then performed by PCR Oligos for PCR and IL2Rγ sequencing: ACTTGGCATATGOTTGTACAGCTCGTCCAT (SEQ ID NO: 1139) and GFP Rev: CACGAACTCCAGCAGGACCATG (SEQ ID NO: 1140) and the amplified fragment is sequenced by Sanger sequencing and migrated on agarose gel. As expected, after analysis (NCBI blast), we find a very close similarity with the GFP-IL2Rγ fragment theoretical replacement of Locus IL2Rγ.

[0313] These results show that the technology according to the invention enables the endogenous IL2Rγ gene to be efficiently replaced by an exogenous sequence.

[0314] Of course, the example given above is intended to demonstrate the effectiveness of the technology, and uses genes such as GFP to facilitate insertion detection.

[0315] In cell therapy, the gene coding for GFP is not used, and sequencing or functional detection of the receptor is used to verify efficacy.

### Example 2—Obtaining B Cells Expressing the Wild-Type ILR2G Gene from Pluripotent Stem Cells

[0316] Since it can be difficult to obtain CD34+ stem cells from the SCID-X patient, it is possible to use induced pluripotent stem cell (iPSc) technology.

[0317] IPSc cells can be derived from cell banks whose immunological profile is compatible with patients.

[0318] It is also possible to take differentiated cells from the patient (e.g. fibroblasts or epithelial cells), and force dedifferentiation by expressing the Oct4 and Socs2 genes, as well as other genes such as Klf4, Dub3, c-Myc, Nanog. Such techniques are now well known to the person skilled in the art, who will be able to adapt the protocols described in the prior art according to the cell type they wish to engage in a dedifferentiation model.

[0319] At this stage, iPSc cells can be transfected with lipofectamine in the presence of tube 4 as described in Example 1.

[0320] Transfected cells are selected using the appropriate antibiotic, and insertion is verified as described in Example 1.

[0321] IPSc cells are grown on cell matrix gel-coated plates, cocultured with inactivated murine embryonic fibroblasts for 24 h, in complete stem cell culture medium supplemented with bFGF and ROCK inhibitor.

[0322] The iPSc cells are then cultured for 7 days in 24 h culture media containing distinct differentiation cocktails each day:
[0323] D0-1: medium supplemented with hBMP-4, hVEGF, hWnt3a and KOSR;
[0324] D2: medium supplemented with hBMP-4, hVEGF, and KOSR;
[0325] D3: medium supplemented with hBMP-4, hVEGF, and bFGF;
[0326] D4-5: medium supplemented with hVEGF and bFGF;
[0327] D6: IMDM medium supplemented with F12, B27, N2, BSA, hVEGF, bFGF, human stem cell factor and hFlt3 ligand;
[0328] D7: IMDM medium supplemented with F12, B27, N2, BSA, hVEGF, bFGF, human stem cell factor, hFlt3 ligand, TPO, IL-6, hEPOgen, and FICZ (6-formylindolo[3,2-b]carbazole)

[0329] After 7 days, the cells are then maintained in culture for a further 3 to 7 days before continuing the experiments on the non-adherent cells harvested. These cells are tested for expression of the CD34+ marker by flow cytometry using an anti-CD34 antibody.

[0330] If the cells have not been transfected at the iPSc stage, they can then be transfected at the CD34+ stage as described in Example 1. Their differentiation is then induced as described in Example 1.

1-17. (canceled)

18. A composition comprising:
a) a first single-stranded nucleic acid molecule, comprising or consisting essentially of:
an A sequence allowing the insertion of a complementary sequence of a nucleic acid of interest, or comprising a complementary sequence of a nucleic acid of interest, said complementary sequence binding at the 5′ to a first T-rich sequence of 40 to 60 nucleotides in length and at the 3′ to a second T-rich sequence of 40 to 60 nucleotides in length, said first and second T-rich sequences respectively comprising a first and a second domain of 6 to 12 G/C-rich nucleotides, the sequence of the first domain being complementary to the sequence of the second domain, said first and second domains being positioned 15 to 52 nucleotides from said A sequence;
at least one first sequence oriented 5′-to-3′ for recognizing a transposase at the 5′ end of said first single-stranded nucleic acid molecule; and
at least one second sequence for recognizing said transposase at the 3′ end of said first single-stranded nucleic acid molecule,
b) a second single-stranded nucleic acid molecule, comprising or consisting essentially of:
a B sequence allowing the insertion of a complementary sequence of a nucleic acid of interest, or comprising a complementary sequence of a nucleic acid of interest, said complementary sequence binding at the 5′ to a third T-rich sequence of 40 to 60 nucleotides in length and at the 3′ to a fourth T-rich sequence of 40 to 60 nucleotides in length, said third and fourth T-rich sequences respectively comprising a third and a fourth domain of 6 to 12 G/C-rich nucleotides, the sequence of the third domain being complementary to the sequence of the fourth domain, said third and fourth domains being positioned 15 to 52 nucleotides from said B sequence;
at least one first sequence oriented 5′-to-3′ for recognizing said transposase at 5′ end of said second single-stranded nucleic acid molecule; and
at least one second sequence for recognizing said transposase at the 3′ end of said second single-stranded nucleic acid molecule,
said B sequence being a complementary sequence of said nucleic acid of interest, the A sequence being positioned at the 5′ of a region of interest of said nucleic acid of interest and the B sequence positioned at the 3′ of the region of interest of said nucleic acid of interest, and
c) a third single-stranded molecule, comprising or consisting essentially of:
at the 5′ end at least one complementary sequence of said second sequence for recognizing said transposase of the first molecule;
at the 3′ end at least one complementary sequence of said first sequence for recognizing said transposase of the second molecule; and
an intermediate region located between the complementary sequence of said second recognition sequence of said transposase of the first molecule and the complementary sequence of said first recognition sequence of said transposase of the second molecule, said intermediate region comprising a sequence coding for a portion of the interleukin-2 receptor gamma or IL2-Rγ, or coding for the complete IL2-Rγ receptor,
the first and third single-stranded nucleic acid molecules being paired according to the base complementarity defined by Watson and Crick so as to define two double-stranded binding sites of said transposase, and the second and third single-stranded nucleic acid molecules being paired according to the base complementarity defined by Watson and Crick so as to define two double-stranded binding sites of said transposase.

19. The composition according to claim 18, wherein said A sequence comprises a sequence complementary to the sequence of a first region of the gene coding for IL2-Rγ, and wherein said B sequence comprises a sequence complementary to the sequence of a second region of the gene coding for IL2-Rγ, said A sequence and said B sequence being two different sequences, said first and second regions of the gene coding for IL2-Rγ, flanking a region comprising a sequence coding for a portion of IL2-Rγ, or coding for the complete IL2-Rγ receptor.

20. The composition according to claim 18, wherein said first molecule comprises at the 5′ end a first sequence oriented 5′-to-3′ for recognizing a transposase and at the 3′ end a second sequence oriented 5′-to-3′ for recognizing said transposase, and wherein the third molecule comprises at the 5′ end a first complementary sequence of said first sequence for recognizing said transposase of the first molecule followed by a second complementary sequence of said second sequence for recognizing said transposase of the first molecule.

21. The composition according to claim 18, wherein said first molecule comprises at the 5′ end a first sequence oriented 5′-to-3′ for recognizing a transposase and at the 3′ end a second sequence for recognizing said transposase, followed by a first complementary sequence of said first sequence for recognizing said transposase, and
wherein the third molecule comprises at the 5′ end a complementary sequence of said second sequence for recognizing said transposase.

22. The composition according to claim 18, wherein said transposase is a bacterial transposase selected from the group consisting of Tn5, Tn9, Tn10, and Tc1/mariner.

23. The composition according to claim 18, wherein the gene coding for IL2-Rγ comprises a sequence selected from the group consisting of SEQ ID NO: 1, SEQ ID NO: 2, and SEQ ID NO: 3.

24. The composition according to claim 18, wherein the first, second and third molecules triplet is selected from the triplets as defined in Table 2.

25. The composition according to claim 18, further comprising:
d) a fourth single-stranded nucleic acid molecule, comprising or consisting essentially of:
an A′ sequence allowing the insertion of a complementary sequence of a nucleic acid of interest, or comprising a complementary sequence of a nucleic acid of interest, said complementary sequence binding at the 5′ to a fifth T-rich sequence of 40 to 60 nucleotides in length and at the 3′ to a sixth T-rich sequence of 40 to 60 nucleotides in length, said fifth and sixth T-rich sequences respectively comprising a fifth and a sixth domain of 6 to 12 G/C-rich nucleotides, the sequence of the fifth domain being complementary to the sequence of the sixth domain, said fifth and sixth domains being positioned 15 to 52 nucleotides from said A′ sequence;
at least one first sequence oriented 5′-to-3′ for recognizing a transposase at the 5′ end of said fourth single-stranded nucleic acid molecule; and
at least one second sequence for recognizing said transposase at the 3′ end of said fourth single-stranded nucleic acid molecule,
e) a fifth single-stranded nucleic acid molecule, comprising or consisting essentially of:
a B′ sequence allowing the insertion of a complementary sequence of a nucleic acid of interest, or comprising a complementary sequence of a nucleic acid of interest, said complementary B′ sequence binding at the 5′ to a seventh T-rich sequence of 40 to 60 nucleotides in length and at the 3′ to an eighth T-rich sequence of 40 to 60 nucleotides in length, said seventh and eighth T-rich sequences respectively comprising a third and a fourth domain of 6 to 12 G-C-rich nucleotides, the sequence of the seventh domain being complementary to the sequence of the eighth domain, said seventh and eighth domains being positioned 15 to 52 nucleotides from said B′ sequence,
at least one first sequence oriented 5′-to-3′ for recognizing a transposase at the 5′ end of said fifth single-stranded nucleic acid molecule; and
at least one second sequence for recognizing said transposase at the 3′ end of said fifth single-stranded nucleic acid molecule said B′ sequence being a complementary sequence of said nucleic acid of interest, the A′ sequence being positioned at the 5′ of a region of interest of said nucleic acid of interest and the B′ sequence positioned at the 3′ of the region of interest of said nucleic acid of interest, and
f) a sixth single-stranded molecule, comprising
at the 5′ end at least one complementary sequence of said fifth sequence for recognizing said transposase of the first molecule;
at the 3′ end at least one complementary sequence of said fourth sequence for recognizing said transposase of the second molecule; and
an intermediate region located between the complementary sequence of said fourth recognition sequence of said transposase of the first molecule and the complementary sequence of said fifth recognition sequence of said transposase of the second molecule, said intermediate region comprising a sequence that is antiparallel and complementary to the sequence coding for the interleukin-2 receptor gamma or IL2-Rγ contained in the third molecule of the first composition,
the fourth and sixth single-stranded nucleic acid molecules being paired according to the base complementarity defined by Watson and Crick so as to define two double-stranded binding sites of said transposase, and the fifth and sixth single-stranded nucleic acid molecules being paired according to the base complementarity defined by Watson and Crick so as to define two double-stranded binding sites of said transposase.

26. The composition according to claim 25, wherein
said A sequence comprises a sequence complementary to the sequence of a first region of the gene coding for IL2-Rγ,
said B sequence comprises a sequence complementary to the sequence of a second region of the gene coding for IL2-Rγ,
said A sequence and said B sequence being two different sequences, said first and second regions of the gene coding for IL2-Rγ, framing a region comprising a sequence coding for a portion of IL2-Rγ, or coding for the complete IL2-Rγ receptor,
said A′ sequence comprises a sequence complementary to the sequence of a third region of the gene coding for IL2-Rγ,
said B′ sequence comprises a sequence complementary to the sequence of a fourth region of the gene coding for IL2-Rγ,
said A′ sequence and said B′ sequence being two different sequences, said third and fourth regions of the gene coding for IL2-Rγ, framing a region comprising a sequence coding for a portion of IL2-Rγ, or coding for the complete IL2-Rγ receptor,
the A sequence and the A′ sequence are at most partially complementary,
the A sequence and the B′ sequence are at most partially complementary,
the B sequence and the A′ sequence are at most partially complementary, and
the B sequence and the B′ sequence are at most partially complementary.

27. A pharmaceutical composition comprising the composition according to claim 18 and a pharmaceutically acceptable carrier.

28. A method of replacing a mutated sequence of the gene coding for IL2-Rγ with a wild-type sequence coding for IL2-Rγ, said method comprising:
a) bringing the composition as defined in claim 18 into contact with the nucleic acid comprising the mutated sequence coding for the IL2-Rγ gene, wherein
the A sequence of said first molecule comprises a complementary sequence of the region immediately at the 5′ of the mutated sequence coding for the IL2-Rγ gene,
the B sequence of said second molecule comprises a complementary sequence of the region immediately at the 3′ of the mutated sequence coding for the IL2-Rγ gene, and
the third molecule comprises the wild-type sequence of the gene coding for IL2-Rγ, located between a complementary sequence of said second sequence for recognizing said transposase of the first molecule and the complementary sequence of said first sequence for recognizing said transposase of the second molecule to obtain a replacement complex,
b) placing the replacement complex in the presence of a transposase recognizing the double-stranded binding sites of said transposase contained in an ensemble, to obtain a recombination complex, and
c) recombining the combination complex to obtain the hybrid nucleic acid molecule the wild-type sequence of the gene coding for IL2-Rγ, in place of the mutated sequence of the gene coding for IL2-Rγ.

29. A method for the replacement of a mutated double-stranded sequence of the gene coding for IL2-Rγ of a stem cell, in particular a hematopoietic stem cell, by a wild-type double-stranded sequence coding for IL2-Rγ, said method comprising:
a) bringing a composition as defined in claim 18 into contact with the hematopoietic stem cell comprising the mutated sequence coding for the IL2-Rγ gene, wherein
the A sequence of said first molecule comprises a complementary sequence of the region immediately at the 5′ of the mutated sequence coding for the IL2-Rγ gene,
the A′ sequence of said fourth molecule comprises a complementary sequence of the region immediately at the 5′ of the mutated complementary sequence coding for the IL2-Rγ gene,
the B sequence of said second molecule comprises a complementary sequence of the region immediately at the 3′ of the mutated sequence coding for the IL2-R geneγ,
the B′ sequence of said second molecule comprises a complementary sequence of the region immediately at the 3′ of the mutated complementary sequence coding for the IL2-Rγ gene, and
the third molecule comprises the wild-type sequence of the gene coding for IL2-Rγ, located between a complementary sequence of said second sequence for recognizing said transposase of the first molecule and the complementary sequence of said first sequence for recognizing said transposase of the second molecule,
the sixth molecule comprises the wild-type sequence of the gene coding for IL2-Rγ, located between a complementary sequence of said second sequence for recognizing said transposase of the first molecule and the complementary sequence of said first sequence for recognizing said transposase of the second molecule to obtain a replacement complex,
b) placing the replacement complex in the presence of a transposase recognizing the double-stranded binding sites of said transposase contained in an ensemble, to obtain a recombination complex, and
c) recombining the combination complex to obtain the hybrid nucleic acid molecule the wild-type sequence of the gene coding for IL2-Rγ, in place of the mutated sequence of the gene coding for IL2-Rγ, and
d) possibly purifying hematopoietic stem cells with mutated gene replacement.

30. A method of inserting a double-stranded sequence of the wild-type gene coding for IL2-Rγ into a cell, in particular a stem cell, in particular a hematopoietic stem cell, at the locus of the gene coding for IL2-Rγ, wherein said locus of the gene coding for IL2-Rγ comprises a mutation affecting the expression, the function, or both, of IL2-Rγ, and wherein said double-stranded sequence of the wild-type gene coding for IL2-Rγ corresponds to the cDNA of said gene, comprising:
a) brining a composition according to claim 18 into contact with the cell comprising a mutation affecting the expression, function or both of IL2-Rγ, at the locus of the gene coding for IL2-Rγ, wherein
the A sequence of said first molecule comprises a complementary sequence of the region at 5′ of exon 1 of the gene coding for IL2-Rγ,
the A′ sequence of said fourth molecule comprises a complementary sequence of the complementary sequence of the region at 5′ of exon 1 of the gene coding for IL2-Rγ,
the B sequence of said second molecule comprises a complementary sequence at 3′ of the region at 5′ of exon 1 of the gene coding for IL2-Rγ,
the B′ sequence of said fifth molecule comprises a complementary sequence at 3′ of the complementary sequence of the region at 5′ of exon 1 of the gene coding for IL2-Rγ, and
the third molecule comprises the wild-type cDNA sequence of the gene coding for IL2-Rγ, located between a complementary sequence of said second sequence for recognizing said transposase of the first molecule and the complementary sequence of said first sequence for recognizing said transposase of the second molecule,
the sixth molecule comprises the wild-type cDNA sequence of the gene coding for IL2-Rγ, located between a complementary sequence of said second sequence for recognizing said transposase of the first molecule and the complementary sequence of said first sequence for recognizing said transposase of the second molecule to obtain a replacement complex,
b) placing the replacement complex in the presence of a transposase recognizing the double-stranded binding sites of said transposase contained in an ensemble, to obtain a recombination complex, and
c) recombining the combination complex to obtain insertion of the cDNA of the gene coding for IL2-Rγ 5′ to exon 1 of the gene coding for IL2-Rγ, and
d) if necessary, purifying the inserted cell.

The application's sequence listing, which the Patent Office published only in electronic form, follows.

SEQUENCE LISTING (1140 sequences)

SEQ ID NO: 1 - DNA, 7130 bp, Homo sapiens
  source 1..7130: mol_type = genomic DNA
accagaagctagaagagaggcatggaacaacttcttcctcagcgcctccagaagggaccaaccctggccacactgatttcggacttctgggctccagaactgtgagaaaataaatgcctttttttcctttttaaaaaatttttatttatttatttatttatttatttatttatttatttatttatttgagatggagtctcactctgttgcacaggctagagtgcagtggcgcaattttggctcactgcaacctctgcctcctagattcaagcgattctcatgtttcagcctcccgagtagctgggattacaggtgtcgccaccatgtctggctaatttttgtatttttagtagagacggggtttcaccaggttggccaggctggtctcgaactcctcaagcaatccacctgccttggcctcccaaagtgctgggattgcaggcgtgagtcactgcacccagccgagagaataaatttctgttggtttaagccactcagtttggggataacttatggcagccctagcaaactaatacatactaaagatacatactaaatactaagctgggccatatagtccagttttcctgagactcccaggcaagtgctgtttttctttgcttaatatcctacaccactttctgtctggtaaaattacactcattctttaagatgccactgaaatagcacctcttcagcacagccttcactaaactatccccctctccatcttggtaaatttagttacttcctcttctgtgctcacatactttgtagtatctctacatttatgctataggacttgttacactatgttgtattacttgtttatgtcttccccacttttctgtgagtgtctagaaatatgaggatgtcttgttggtctatttccagaacataagcacagtgcctggcacatattaaaaacgtaataaatgtttgctgaataaatagtttctgtaagtggcttctccaatcacctctgtgttttcggggaaggtaaaactggcaacaggatgaagaatggattagagagcagagggcctttagaaagggaggccagttgatggagtctagatagaatcatgactagagctaatgaaagactgatttagcagagtggctgtggtaatggaaaggaggaaaccgttgggagaaacaccacagaagcagagtgggttatattctctgggtgagagagggggagaaattgaagctgattctgaggtttcaagtctgggtgactgagagggtgacgataccattgactgaggtggggaaggcaggaagagaagcagagttgggggaagatgggaagcttgaagctagtattgttgttcctccatttctagaatatttttgtattataagtcacacttcctcgccagtctcaacagggacccagctcaggcagcagctaagggtgggtattctggtttggattagatcagaggaaagacagctgtatatgtgcccacaggagccaagacggtattttccatcctcccaaaacagtagagctttgacagagatttaagggtgaccaagtcaaggaagaggcatggcatagaacggtgatgtcgggggtgggggttcagaacttccattatagaaggtaatgatttagaggagaaggtggttgagaatggtgctagtggtagtgaacagatccttcccaggatctaggtgggctgaggatttttgagtctgtgacactattgtatatccagctttagtttctgtttaccaccttacagcagcacctaatctcctagaggacttagcccgtgtcacacagcacatatttgccacaccctctgtaaagccctggtttataaggttctttccaccggaagctatgacagaggaaacgtgtgggtggggaggggtagtgggtgagggacccaggttcctgacacagacagactacacccagggaatgaagagcaagcgccatgttgaagccatcattaccattcacatccctcttattcctgcagctgcccctgctgggagtggggctgaacacgacaattctgacgcccaatgggaatgaagacaccacagctggtgggaaatctgggactggagggggctggtgagaagggtggctgtgggaaggggccgtacagagatctggtgcctgccactggccattacaatcatgtgggcagaattgaaaagtggagtgggaagggcaagggggagggttccctgcctcacgctacttcttctttctttctttcttgtttgtttgtttctttctttcttttgaggcagggtctcactatgttgcctaggctggtctcaaactcctggcctctagtgatcctcctgcctcagcctttcaaagcaccaggattacagacatgagccaccgtgcttggcctcctccttctgaccatcatttctctttccctccctgccttcattttctccccaatctagatttcttcctgaccactatgcccactgactccctcagtgtttccactctgcccctcccagaggttcagtgttttgtgttcaatgtcgagtacatgaattgcacttggaacagcagctctgagccccagcctaccaacctcactctgcattattggtatgagaagggacgagggggaggggatgaagaagaggtgggttggatcagagaccaagagagagggtagcaagtctcccaggtaccccactgttttctcctggggtaagtcataagtcggttgaggggagatgaggctaggctctggatatctgcagtacccagattggccccactgttcctcttccttccaacctttctcctctaggtacaagaactcggataatgataaagtccagaagtgcagccactatctattctctgaagaaatcacttctggctgtcagttgcaaaaaaaggagatccacctctaccaaacatttgttgttcagctccaggacccacgggaacccaggagacaggccacacagatgctaaaactgcagaatctgggtaatttggaaagaaagggtcaagagaccagggatactgtgggacattggagtctacagagtagtgttcttttatcataagggtacatgggcagaaaagaggaggtaggggatcatgatgggaagggaggaggtattaggggcactaccttcaggatcctgacttgtctaggccaggggaatgaccacatatgcacacatatctccagtgatcccctgggctccagagaacctaacacttcacaaactgagtgaatcccagctagaactgaactggaacaacagattcttgaaccactgtttggagcacttggtgcagtaccggactgactgggaccacagctggactgtgagtgactagggacgtgaatgtagcagctaaggccaagaaagtagggctaaaggattcaaccagacagatagaaggacctaatatcaagctcctgttctctgcctcccagcttctctgctcaccccctaccctccctcctccaactcctttcccccctattttctccagtgagttttctttttttcttttcttttctttctttctttcttttttttttttttttgagacagagcctcactctgttgcccaggcttgagtgcagtggggcgatcttgggctcactgcgacctctgtctccctggttcaagtgattctcctgcttcagcctcccaagtagctgggagcatgcacaaccatgcctggctaatttttgtatttttagtaaagacagggttttgccatgttggtcaggctggtcttgaactcctgacctcaggtgatctgcccacctcggcctcccaaagtgctgggattacaggcgtgagccaccattcctgacaccagtgagttttcattagggattccctacccatactcttcctgataccagatagacaagtaaacaaaaggaagccattaaggggatccagaggggaggcattagattcaagtcagtgaagggagcagtgtggcttgagtagtcaagagatgagagagaaactgggcagtagcagagatgacactggtgggtgttcaggagtatgttttaattctcccttctctcatagacacccactttccctcatcctctttctcctcaaggaacaatcagtggattatagacataagttctccttgcctagtgtggatgggcagaaacgctacacgtttcgtgttcggagccgctttaacccactctgtggaagtgctcagcattggagtgaatggagccacccaatccactgggggagcaatacttcaaaaggtaaaatgggcccacatgacccaatccatgagcccaacaccccagcctttctaacaccactgtcttttgctccacttccctgtcactaaagcccctaaacttggtgccccatctctccacactgtctaaccccaacctctagaaatcaaggtttttctgtgtagggttgggttagcgtgttgttagagtaggggagtggattgagaaggaggctgaggggtactcaagggggctatagaatgtataggatttccctgaagcattcctagagagcctgcaaggtgaagatggctttggaaccagctggatctaggctgtgccacatactacctctttggccttggccacatccctaaactcttggattctgtttcctaagatgtaagatggaggtaattgttcctgcctcacaggagctgttgtgaggattaaacagagagtatgtctttagcgcggtgcctggcaccagtgcctggcatgtagtaggggcacaacaaatataaggtccactttgcttttcttttttctatagagaatcctttcctgtttgcattggaagccgtggttatctctgttggctccatgggattgattatcagccttctctgtgtgtatttctggctggaacggtgagatttggagaagcccagaaaaatgaggggaacggtagctgacaatagcagaggagggttttgcagggtctttaggagtaaaggatgagacagtaagtaatgagagattacccaagagggtttggtgatggaaggaagccacaggcacagagaacacagaatcactttatttcatatgggacaactgggagaagggtgataaaaaagctttaacctatgtgctcctgctccctctttctcccctgtcaggacgatgccccgaattcccaccctgaagaacctagaggatcttgttactgaataccacgggaacttttcggtgagaacgctgtcataagcatgctgcagtctatcaactgccaactgcctgccagcaagacagacagagtgtgggggtgggggcagagaggagagggaaggaggccctgcactaactgtcaggatgtggccgaccaaatggggcatggactatacagagagagacacacacagaagtgcagattatagattgaatgaggcagatggcaactggtattgggggcccaggagcctgtgtatcccttctgtaatcaattacagtggttgcagacatcatgagtactcctttggcacagagctcggtcttttacttcctgcccctaattgacccctgacctggacatatctgtctttaggcctggagtggtgtgtctaagggactggctgagagtctgcagccagactacagtgaacgactctgcctcgtcagtgagattcccccaaaaggaggggcccttggggaggggcctggggcctccccatgcaaccagcatagcccctactgggcccccccatgttacaccctaaagcctgaaacctgaaccccaatcctctgacagaagaaccccagggtcctgtagccctaagtggtactaactttccttcattcaacccacctgcgtctcatactcacctcaccccactgtggctgatttggaattttgtgcccccatgtaagcaccccttcatttggcattccccacttgagaattacccttttgccccgaacatgtttttcttctccctcagtctggcccttccttttcgcaggattcttcctccctccctctttccctcccttcctctttccatctaccctccgattgttcctgaaccgatgagaaataaagtttctgttgataatcatcaaaaatgtctgtcatgggggtggggagcaggggaagcctgggatgcaatgagggtgggaggggaagaaaaaggagtagtacattcatgctgtggaggcaggagtattaccaatttgctagaaagagtactgttctggaaactgacttttttccaggtgccctgcactcattccagggtttagtttagagttagacttacaatgggctgggcgtggtggctcacgcctgtaatcccagcactttgggaggccaaagcgggtggatcacgaggtcaggagatcgagaccagcctggccaacatggtgaaaccccgtctctactaaaaatacaaaaattagccaggcgtgatggtgtgctcctgtaattccagctacttgggaggctgaggcaggagaatcgcttgaacccaggaggtagaggatgcagtgagccaagattgtgccactgcactccagcctgggcgacagagggagactccatctaaaaaaataaaaaaaataaaaaaagttagacttaccatgttgtcccccctttccaactaatctttaacataccccacccaagtttttctctccttacccttactccactttttggccacacctgccacttctgacctcataatcccttaactgcagtctcaggccccacccctggggatactggttatccacaactatcaacagctctctcctgcctgtccagcctgggcatcctcagcctatgaaatccatctgcctctctagtccaccaaccctataggcctatttgccccacacaaggcctctagaacaccctccttctgcatgactcatcagggcactttgtgaagagtgaggcgatcttgagggcatgttcatcttcatcaaacatggaggtgaggggcagcacagaactagagtctgtggatgggggtggagggatctgagggcagtggagatcacagaaatgggcccatgtgtcccatcctatctcttctcagataatcagcagtttctggtcaataccaactgtgctgtcgtcgtgttgctgtattacat

SEQ ID NO: 2 - DNA, 3808 bp, Homo sapiens
  source 1..3808: mol_type = genomic DNA
atgttgaagccatcattaccattcacatccctcttattcctgcagctgcccctgctgggagtggggctgaacacgacaattctgacgcccaatgggaatgaagacaccacagctggtgggaaatctgggactggagggggctggtgagaagggtggctgtgggaaggggccgtacagagatctggtgcctgccactggccattacaatcatgtgggcagaattgaaaagtggagtgggaagggcaagggggagggttccctgcctcacgctacttcttctttctttctttcttgtttgtttgtttctttctttcttttgaggcagggtctcactatgttgcctaggctggtctcaaactcctggcctctagtgatcctcctgcctcagcctttcaaagcaccaggattacagacatgagccaccgtgcttggcctcctccttctgaccatcatttctctttccctccctgccttcattttctccccaatctagatttcttcctgaccactatgcccactgactccctcagtgtttccactctgcccctcccagaggttcagtgttttgtgttcaatgtcgagtacatgaattgcacttggaacagcagctctgagccccagcctaccaacctcactctgcattattggtatgagaagggacgagggggaggggatgaagaagaggtgggttggatcagagaccaagagagagggtagcaagtctcccaggtaccccactgttttctcctggggtaagtcataagtcggttgaggggagatgaggctaggctctggatatctgcagtacccagattggccccactgttcctcttccttccaacctttctcctctaggtacaagaactcggataatgataaagtccagaagtgcagccactatctattctctgaagaaatcacttctggctgtcagttgcaaaaaaaggagatccacctctaccaaacatttgttgttcagctccaggacccacgggaacccaggagacaggccacacagatgctaaaactgcagaatctgggtaatttggaaagaaagggtcaagagaccagggatactgtgggacattggagtctacagagtagtgttcttttatcataagggtacatgggcagaaaagaggaggtaggggatcatgatgggaagggaggaggtattaggggcactaccttcaggatcctgacttgtctaggccaggggaatgaccacatatgcacacatatctccagtgatcccctgggctccagagaacctaacacttcacaaactgagtgaatcccagctagaactgaactggaacaacagattcttgaaccactgtttggagcacttggtgcagtaccggactgactgggaccacagctggactgtgagtgactagggacgtgaatgtagcagctaaggccaagaaagtagggctaaaggattcaaccagacagatagaaggacctaatatcaagctcctgttctctgcctcccagcttctctgctcaccccctaccctccctcctccaactcctttcccccctattttctccagtgagttttctttttttcttttcttttctttctttctttcttttttttttttttttgagacagagcctcactctgttgcccaggcttgagtgcagtggggcgatcttgggctcactgcgacctctgtctccctggttcaagtgattctcctgcttcagcctcccaagtagctgggagcatgcacaaccatgcctggctaatttttgtatttttagtaaagacagggttttgccatgttggtcaggctggtcttgaactcctgacctcaggtgatctgcccacctcggcctcccaaagtgctgggattacaggcgtgagccaccattcctgacaccagtgagttttcattagggattccctacccatactcttcctgataccagatagacaagtaaacaaaaggaagccattaaggggatccagaggggaggcattagattcaagtcagtgaagggagcagtgtggcttgagtagtcaagagatgagagagaaactgggcagtagcagagatgacactggtgggtgttcaggagtatgttttaattctcccttctctcatagacacccactttccctcatcctctttctcctcaaggaacaatcagtggattatagacataagttctccttgcctagtgtggatgggcagaaacgctacacgtttcgtgttcggagccgctttaacccactctgtggaagtgctcagcattggagtgaatggagccacccaatccactgggggagcaatacttcaaaaggtaaaatgggcccacatgacccaatccatgagcccaacaccccagcctttctaacaccactgtcttttgctccacttccctgtcactaaagcccctaaacttggtgccccatctctccacactgtctaaccccaacctctagaaatcaaggtttttctgtgtagggttgggttagcgtgttgttagagtaggggagtggattgagaaggaggctgaggggtactcaagggggctatagaatgtataggatttccctgaagcattcctagagagcctgcaaggtgaagatggctttggaaccagctggatctaggctgtgccacatactacctctttggccttggccacatccctaaactcttggattctgtttcctaagatgtaagatggaggtaattgttcctgcctcacaggagctgttgtgaggattaaacagagagtatgtctttagcgcggtgcctggcaccagtgcctggcatgtagtaggggcacaacaaatataaggtccactttgcttttcttttttctatagagaatcctttcctgtttgcattggaagccgtggttatctctgttggctccatgggattgattatcagccttctctgtgtgtatttctggctggaacggtgagatttggagaagcccagaaaaatgaggggaacggtagctgacaatagcagaggagggttttgcagggtctttaggagtaaaggatgagacagtaagtaatgagagattacccaagagggtttggtgatggaaggaagccacaggcacagagaacacagaatcactttatttcatatgggacaactgggagaagggtgataaaaaagctttaacctatgtgctcctgctccctctttctcccctgtcaggacgatgccccgaattcccaccctgaagaacctagaggatcttgttactgaataccacgggaacttttcggtgagaacgctgtcataagcatgctgcagtctatcaactgccaactgcctgccagcaagacagacagagtgtgggggtgggggcagagaggagagggaaggaggccctgcactaactgtcaggatgtggccgaccaaatggggcatggactatacagagagagacacacacagaagtgcagattatagattgaatgaggcagatggcaactggtattgggggcccaggagcctgtgtatcccttctgtaatcaattacagtggttgcagacatcatgagtactcctttggcacagagctcggtcttttacttcctgcccctaattgacccctgacctggacatatctgtctttaggcctggagtggtgtgtctaagggactggctgagagtctgcagccagactacagtgaacgactctgcctcgtcagtgagattcccccaaaaggaggggcccttggggaggggcctggggcctccccatgcaaccagcatagcccctactgggcccccccatgttacaccctaaagcctgaaacctga

SEQ ID NO: 3 - DNA, 1110 bp, Homo sapiens
  source 1..1110: mol_type = other DNA
atgttgaagccatcattaccattcacatccctcttattcctgcagctgcccctgctgggagtggggctgaacacgacaattctgacgcccaatgggaatgaagacaccacagctgatttcttcctgaccactatgcccactgactccctcagtgtttccactctgcccctcccagaggttcagtgttttgtgttcaatgtcgagtacatgaattgcacttggaacagcagctctgagccccagcctaccaacctcactctgcattattggtacaagaactcggataatgataaagtccagaagtgcagccactatctattctctgaagaaatcacttctggctgtcagttgcaaaaaaaggagatccacctctaccaaacatttgttgttcagctccaggacccacgggaacccaggagacaggccacacagatgctaaaactgcagaatctggtgatcccctgggctccagagaacctaacacttcacaaactgagtgaatcccagctagaactgaactggaacaacagattcttgaaccactgtttggagcacttggtgcagtaccggactgactgggaccacagctggactgaacaatcagtggattatagacataagttctccttgcctagtgtggatgggcagaaacgctacacgtttcgtgttcggagccgctttaacccactctgtggaagtgctcagcattggagtgaatggagccacccaatccactgggggagcaatatttcaaaagagaatcctttcctgtttgcattggaagccgtggttatctctgttggctccatgggattgattatcagccttctctgtgtgtatttctggctggaacggacgatgccccgaattcccaccctgaagaacctagaggatcttgttactgaataccacgggaacttttcggcctggagtggtgtgtctaagggactggctgagagtctgcagccagactacagtgaacgactctgcctcgtcagtgagattcccccaaaaggaggggcccttggggaggggcctggggcctccccatgcaaccagcatagcccctactgggcccccccatgttacaccctaaagcctgaaacctga

SEQ ID NO: 4-5 - skipped (2 entries)

SEQ ID NO: 6 - DNA, 30 bp, unidentified
  source 1..30: mol_type = other DNA
atctatgtcgggtgcggagaaagaggtaat

SEQ ID NO: 7-25 - skipped (19 entries)

SEQ ID NO: 26 - DNA, 27 bp, unidentified
  source 1..27: mol_type = other DNA
taactataacggtcctaaggtagcgaa

SEQ ID NO: 27 - DNA, 18 bp, unidentified
  source 1..18: mol_type = other DNA
tagggataacagggtaat

SEQ ID NO: 28 - DNA, 30 bp, unidentified
  source 1..30: mol_type = other DNA
tggcaaacagctattatgggtattatgggt

SEQ ID NO: 29 - DNA, 19 bp, unidentified
  source 1..19: mol_type = other DNA
ctgtctcttatacacatct

SEQ ID NO: 30 - DNA, 19 bp, unidentified
  source 1..19: mol_type = other DNA
ctgactcttatacacaagt

SEQ ID NO: 31 - DNA, 19 bp, unidentified
  source 1..19: mol_type = other DNA
ctgtctcttgatcagatct

SEQ ID NO: 32 - DNA, 19 bp, unidentified
  source 1..19: mol_type = other DNA
agatgtgtataagagacag

SEQ ID NO: 33 - DNA, 19 bp, unidentified
  source 1..19: mol_type = other DNA
acttgtgtataagagtcag

SEQ ID NO: 34 - DNA, 19 bp, unidentified
  source 1..19: mol_type = other DNA
agatctgatcaagagacag

SEQ ID NO: 35 - DNA, 19 bp, unidentified
  source 1..19: mol_type = other DNA
ctgtctcttatacacatct

SEQ ID NO: 36 - DNA, 33 bp, unidentified
  source 1..33: mol_type = other DNA
tcgtcggcagcgtcagatgtgtataagagacag

SEQ ID NO: 37 - DNA, 34 bp, unidentified
  source 1..34: mol_type = other DNA
gtctcgtgggctcggagatgtgtataagagacag

SEQ ID NO: 38 - DNA, 20 bp, unidentified
  source 1..20: mol_type = other DNA
ctgagagatcccctcataat

SEQ ID NO: 39 - DNA, 20 bp, unidentified
  source 1..20: mol_type = other DNA
attatgaggggatctctcag

SEQ ID NO: 40 - DNA, 20 bp, unidentified
  source 1..20: mol_type = other DNA
gactctctaggggagtatta

SEQ ID NO: 41 - DNA, 20 bp, unidentified
  source 1..20: mol_type = other DNA
taatactcccctagagagtc

SEQ ID NO: 42 - DNA, 20 bp, unidentified
  source 1..20: mol_type = other DNA
ctgagagatcccctcataat

SEQ ID NO: 43 - DNA, 20 bp, unidentified
  source 1..20: mol_type = other DNA
attatgaggggatctctcag

SEQ ID NO: 44 - DNA, 20 bp, unidentified
  source 1..20: mol_type = other DNA
gactctctaggggagtatta

SEQ ID NO: 45 - DNA, 20 bp, unidentified
  source 1..20: mol_type = other DNA
taatactcccctagagagtc

SEQ ID NO: 46 - DNA, 20 bp, unidentified
  source 1..20: mol_type = other DNA
ctgagagatcccctcataat

SEQ ID NO: 47 - DNA, 20 bp, unidentified
  source 1..20: mol_type = other DNA
attatgaggggatctctcag

SEQ ID NO: 48 - DNA, 20 bp, unidentified
  source 1..20: mol_type = other DNA
gactctctaggggagtatta

SEQ ID NO: 49 - DNA, 20 bp, unidentified
  source 1..20: mol_type = other DNA
taatactcccctagagagtc

SEQ ID NO: 50 - DNA, 20 bp, unidentified
  source 1..20: mol_type = other DNA
ctgagagatcccctcataat

SEQ ID NO: 51 - DNA, 20 bp, unidentified
  source 1..20: mol_type = other DNA
attatgaggggatctctcag

SEQ ID NO: 52 - DNA, 20 bp, unidentified
  source 1..20: mol_type = other DNA
gactctctaggggagtatta

SEQ ID NO: 53 - DNA, 20 bp, unidentified
  source 1..20: mol_type = other DNA
taatactcccctagagagtc

SEQ ID NO: 54 - DNA, 29 bp, unidentified
  source 1..29: mol_type = other DNA
ctgatgaatcccctaatgattttggtaaa

SEQ ID NO: 55 - DNA, 29 bp, unidentified
  source 1..29: mol_type = other DNA
tttaccaaaatcattaggggattcatcag

SEQ ID NO: 56 - DNA, 29 bp, unidentified
  source 1..29: mol_type = other DNA
ctgagagatcccctcataatttccccaaa

SEQ ID NO: 57 - DNA, 29 bp, unidentified
  source 1..29: mol_type = other DNA
tttggggaaattatgaggggatctctcag

SEQ ID NO: 58 - DNA, 29 bp, unidentified
  source 1..29: mol_type = other DNA
catggccgtcaacctaagaagccttattt

SEQ ID NO: 59 - DNA, 29 bp, unidentified
  source 1..29: mol_type = other DNA
aaataaggcttcttaggttgacggccatg

SEQ ID NO: 60 - DNA, 29 bp, unidentified
  source 1..29: mol_type = other DNA
catggccgtcaacctaagaaggcataaaa

SEQ ID NO: 61 - DNA, 29 bp, unidentified
  source 1..29: mol_type = other DNA
ttttatgccttcttaggttgacggccatg

SEQ ID NO: 62 - DNA, 29 bp, unidentified
  source 1..29: mol_type = other DNA
cactacagttgcattttgtgttgagttct

SEQ ID NO: 63 - DNA, 29 bp, unidentified
  source 1..29: mol_type = other DNA
agaactcaacacaaaatgcaactgtagtg

SEQ ID NO: 64 - DNA, 29 bp, unidentified
  source 1..29: mol_type = other DNA
cactacagttgcattttgtgtcgtgagtg

SEQ ID NO: 65 - DNA, 29 bp, unidentified
  source 1..29: mol_type = other DNA
cactcacgacacaaaatgcaactgtagtg

SEQ ID NO: 66 - DNA, 29 bp, unidentified
  source 1..29: mol_type = other DNA
cataagcgctaacttaagggttgtggtat

SEQ ID NO: 67 - DNA, 29 bp, unidentified
  source 1..29: mol_type = other DNA
ataccacaacccttaagttagcgcttatg

SEQ ID NO: 68 - DNA, 29 bp, unidentified
  source 1..29: mol_type = other DNA
cataagcgctaacttaagggttgaaccat

SEQ ID NO: 69 - DNA, 29 bp, unidentified
  source 1..29: mol_type = other DNA
atggttcaacccttaagttagcgcttatg

SEQ ID NO: 70 - DNA, 29 bp, unidentified
  source 1..29: mol_type = other DNA
catgcccatcaacttaagaatctagacta

SEQ ID NO: 71 - DNA, 29 bp, unidentified
  source 1..29: mol_type = other DNA
tagtctagattcttaagttgatgggcatg

SEQ ID NO: 72 - DNA, 29 bp, unidentified
  source 1..29: mol_type = other DNA
catgcccatcaacttaagaacaaaaataa

SEQ ID NO: 73 - DNA, 29 bp, unidentified
  source 1..29: mol_type = other DNA
ttatttttgttcttaagttgatgggcatg

SEQ ID NO: 74 - DNA, 29 bp, unidentified
  source 1..29: mol_type = other DNA
catcgccatcaagctaaggaaaaggagat

SEQ ID NO: 75 - DNA, 29 bp, unidentified
  source 1..29: mol_type = other DNA
atctccttttccttagcttgatggcgatg

SEQ ID NO: 76 - DNA, 29 bp, unidentified
  source 1..29: mol_type = other DNA
catcgccatcaagctaacgaaattgaact

SEQ ID NO: 77 - DNA, 29 bp, unidentified
  source 1..29: mol_type = other DNA
agttcaatttcgttagcttgatggcgatg

SEQ ID NO: 78 - DNA, 29 bp, unidentified
  source 1..29: mol_type = other DNA
taatgccgatcagttaaggatcagttcac

SEQ ID NO: 79 - DNA, 29 bp, unidentified
  source 1..29: mol_type = other DNA
gtgaactgatccttaactgatcggcatta

SEQ ID NO: 80 - DNA, 29 bp, unidentified
  source 1..29: mol_type = other DNA
taatgccagtcagttaagcaactgactgg

SEQ ID NO: 81 - DNA, 29 bp, unidentified
  source 1..29: mol_type = other DNA
ccagtcagttgcttaactgactggcatta

SEQ ID NO: 82 - DNA, 29 bp, unidentified
  source 1..29: mol_type = other DNA
taagagagttaatttataatctattttca

SEQ ID NO: 83 - DNA, 29 bp, unidentified
  source 1..29: mol_type = other DNA
tgaaaatagattataaattaactctctta

SEQ ID NO: 84 - DNA, 29 bp, unidentified
  source 1..29: mol_type = other DNA
taaggatgttaatttattaatttaaaagg

SEQ ID NO: 85 - DNA, 29 bp, unidentified
  source 1..29: mol_type = other DNA
ccttttaaattaataaattaacatcctta

SEQ ID NO: 86 - DNA, 29 bp, unidentified
  source 1..29: mol_type = other DNA
ctgactcttatacacaagtagcgtcctga

SEQ ID NO: 87 - DNA, 29 bp, unidentified
  source 1..29: mol_type = other DNA
tcaggacgctacttgtgtataagagtcag

SEQ ID NO: 88 - DNA, 30 bp, unidentified
  source 1..30: mol_type = other DNA
caggcgtgttgattatccaataaaatccca

SEQ ID NO: 89 - DNA, 29 bp, unidentified
  source 1..29: mol_type = other DNA
caggggatcaagatctgatcaagagacag

SEQ ID NO: 90 - DNA, 30 bp, unidentified; identical to SEQ ID NO: 88
  source 1..30: mol_type = other DNA

SEQ ID NO: 91 - DNA, 30 bp, unidentified
  source 1..30: mol_type = other DNA
tgggattttattggataatcaacacgcctg

SEQ ID NO: 92 - DNA, 30 bp, unidentified
  source 1..30: mol_type = other DNA
cacgagtgttgattatccaaaattataaca

SEQ ID NO: 93 - DNA, 30 bp, unidentified
  source 1..30: mol_type = other DNA
tgttataattttggataatcaacactcgtg

SEQ ID NO: 94 - DNA, 30 bp, unidentified
  source 1..30: mol_type = other DNA
cttaacgggtgacaaggcatcctctagcct

SEQ ID NO: 95 - DNA, 30 bp, unidentified
  source 1..30: mol_type = other DNA
aggctagaggatgccttgtcacccgttaag

SEQ ID NO: 96 - DNA, 30 bp, unidentified
  source 1..30: mol_type = other DNA
cttaacgggtgacaacgtagcctacgaagc

SEQ ID NO: 97 - DNA, 30 bp, unidentified
  source 1..30: mol_type = other DNA
gcttcgtaggctacgttgtcacccgttaag

SEQ ID NO: 98 - DNA, 29 bp, unidentified
  source 1..29: mol_type = other DNA
ccttaattccgcaacactatagtttaaca

SEQ ID NO: 99 - DNA, 29 bp, unidentified
  source 1..29: mol_type = other DNA
tgttaaactatagtgttgcggaattaagg

SEQ ID NO: 100 - DNA, 29 bp, unidentified
  source 1..29: mol_type = other DNA
cctcaaatccgcaacctatagggtttagt

SEQ ID NO: 101 - DNA, 29 bp, unidentified
  source 1..29: mol_type = other DNA
actaaaccctataggttgcggatttgagg

SEQ ID NO: 102 - DNA, 29 bp, unidentified
  source 1..29: mol_type = other DNA
cagtacctcacaaagccggttagttgaga

SEQ ID NO: 103 - DNA, 29 bp, unidentified
  source 1..29: mol_type = other DNA
tctcaactaaccggctttgtgaggtactg

SEQ ID NO: 104 - DNA, 29 bp, unidentified
  source 1..29: mol_type = other DNA
cagtacctcacaaagcattctcggctagc

SEQ ID NO: 105 - DNA, 29 bp, unidentified
  source 1..29: mol_type = other DNA
gctagccgagaatgctttgtgaggtactg

SEQ ID NO: 106 - DNA, 37 bp, unidentified
  source 1..37: mol_type = other DNA
ggccgtgaacccataaactgggtaccggattactgat

SEQ ID NO: 107 - DNA, 37 bp, unidentified
  source 1..37: mol_type = other DNA
atcagtaatccggtacccagtttatgggttcacggcc

SEQ ID NO: 108 - DNA, 37 bp, unidentified
  source 1..37: mol_type = other DNA
ggccgtagactcataagcccgcagccacaggcgcatt

SEQ ID NO: 109 - DNA, 37 bp, unidentified
  source 1..37: mol_type = other DNA
aatgcgcctgtggctgcgggcttatgagtctacggcc

SEQ ID NO: 110 - DNA, 37 bp, unidentified
  source 1..37: mol_type = other DNA
gggcttgtctgcattcaaggattcccttttgtacgaa

SEQ ID NO: 111 - DNA, 37 bp, unidentified
  source 1..37: mol_type = other DNA
ttcgtacaaaagggaatccttgaatgcagacaagccc

SEQ ID NO: 112 - DNA, 37 bp, unidentified
  source 1..37: mol_type = other DNA
gggcgtgtctgcattcaacgtaaccagatcatagcgc

SEQ ID NO: 113 - DNA, 37 bp, unidentified
  source 1..37: mol_type = other DNA
gcgctatgatctggttacgttgaatgcagacacgccc

SEQ ID NO: 114 - DNA, 37 bp, unidentified
  source 1..37: mol_type = other DNA
ggctttgttgaataaatcgaacttttgctgagttgaa

SEQ ID NO: 115 - DNA, 37 bp, unidentified
  source 1..37: mol_type = other DNA
ttcaactcagcaaaagttcgatttattcaacaaagcc

SEQ ID NO: 116 - DNA, 37 bp, unidentified
  source 1..37: mol_type = other DNA
ggctttgttgaataaatcagatttcgggtaagtctcc

SEQ ID NO: 117 - DNA, 37 bp, unidentified
  source 1..37: mol_type = other DNA
ggagacttacccgaaatctgatttattcaacaaagcc

SEQ ID NO: 118 - DNA, 28 bp, unidentified
  source 1..28: mol_type = other DNA
ggtgatgctgccaacttactgatttagt

SEQ ID NO: 119 - DNA, 28 bp, unidentified
  source 1..28: mol_type = other DNA
actaaatcagtaagttggcagcatcacc

SEQ ID NO: 120 - DNA, 28 bp, unidentified
  source 1..28: mol_type = other DNA
ggtaatgactccaacttattgatagtgt

SEQ ID NO: 121 - DNA, 28 bp, unidentified
  source 1..28: mol_type = other DNA
acactatcaataagttggagtcattacc

SEQ ID NO: 122 - DNA, 28 bp, unidentified
  source 1..28: mol_type = other DNA
ggtgatgcctctaattagttgaatctga

SEQ ID NO: 123 - DNA, 28 bp, unidentified
  source 1..28: mol_type = other DNA
tcagattcaactaattagaggcatcacc

SEQ ID NO: 124 - DNA, 28 bp, unidentified
  source 1..28: mol_type = other DNA
ggtgatgcttccaattagtagaacatgt

SEQ ID NO: 125 - DNA, 28 bp, unidentified
  source 1..28: mol_type = other DNA
acatgttctactaattggaagcatcacc

SEQ ID NO: 126 - DNA, 28 bp, unidentified
  source 1..28: mol_type = other DNA
ggtcatgcattcaatgcggagcggagat

SEQ ID NO: 127 - DNA, 28 bp, unidentified
  source 1..28: mol_type = other DNA
atctccgctccgcattgaatgcatgacc

SEQ ID NO: 128 - DNA, 28 bp, unidentified
  source 1..28: mol_type = other DNA
ggtcatgtattcaatctggttattagta

SEQ ID NO: 129 - DNA, 28 bp, unidentified
  source 1..28: mol_type = other DNA
tactaataaccagattgaatacatgacc

SEQ ID NO: 130 - DNA, 28 bp, unidentified
  source 1..28: mol_type = other DNA
gagagtttcaaatagataatgatgtggg

SEQ ID NO: 131 - DNA, 28 bp, unidentified
  source 1..28: mol_type = other DNA
cccacatcattatctatttgaaactctc

SEQ ID NO: 132 - DNA, 28 bp, unidentified
  source 1..28: mol_type = other DNA
gagagtttcaagaaagtaatgagaggcg

SEQ ID NO: 133 - DNA, 28 bp, unidentified
  source 1..28: mol_type = other DNA
cgcctctcattactttcttgaaactctc

SEQ ID NO: 134 - DNA, 28 bp, unidentified
  source 1..28: mol_type = other DNA
ggcattggtagttaattatagttatata

SEQ ID NO: 135 - DNA, 28 bp, unidentified
  source 1..28: mol_type = other DNA
tatataactataattaactaccaatgcc

SEQ ID NO: 136 - DNA, 28 bp, unidentified
  source 1..28: mol_type = other DNA
ggtattgttaattaaatatagataactc

SEQ ID NO: 137 - DNA, 28 bp, unidentified
  source 1..28: mol_type = other DNA
gagttatctatatttaattaacaatacc

SEQ ID NO: 138 - DNA, 28 bp, unidentified
  source 1..28: mol_type = other DNA
gatagtgccgtcattaagctatttatat

SEQ ID NO: 139 - DNA, 28 bp, unidentified
  source 1..28: mol_type = other DNA
atataaatagcttaatgacggcactatc

SEQ ID NO: 140 - DNA, 28 bp, unidentified
  source 1..28: mol_type = other DNA
gatagtgtcgtcattaagctacaaattc

SEQ ID NO: 141 - DNA, 28 bp, unidentified
  source 1..28: mol_type = other DNA
gaatttgtagcttaatgacgacactatc

SEQ ID NO: 142 - DNA, 55 bp, unidentified
  source 1..55: mol_type = other DNA
gggagtgttctcatgcagtcatnnnnnnnnnnnnnnnnnnnnnnnnttatattag

SEQ ID NO: 143 - DNA, 55 bp, unidentified
  source 1..55: mol_type = other DNA
ctaatataannnnnnnnnnnnnnnnnnnnnnnnatgactgcatgagaacactccc

SEQ ID NO: 144 - DNA, 55 bp, unidentified
  source 1..55: mol_type = other DNA
gggagtgttctcatgcagtcatnnnnnnnnnnnnnnnnnnnnnnnnatattaagg

SEQ ID NO: 145 - DNA, 55 bp, unidentified
  source 1..55: mol_type = other DNA
ccttaatatnnnnnnnnnnnnnnnnnnnnnnnnatgactgcatgagaacactccc

SEQ ID NO: 146 - DNA, 49 bp, unidentified
  source 1..49: mol_type = other DNA
gggactgttctcaaacagtcatnnnnnnnnnnnnnnnnnngtaatatta

SEQ ID NO: 147 - DNA, 49 bp, unidentified
  source 1..49: mol_type = other DNA
taatattacnnnnnnnnnnnnnnnnnnatgactgtttgagaacagtccc

SEQ ID NO: 148 - DNA, 49 bp, unidentified
  source 1..49: mol_type = other DNA
gggactgttctcaaacagtcatnnnnnnnnnnnnnnnnnngtaaaaata

SEQ ID NO: 149 - DNA, 49 bp, unidentified
  source 1..49: mol_type = other DNA
tatttttacnnnnnnnnnnnnnnnnnnatgactgtttgagaacagtccc

SEQ ID NO: 150 - DNA, 54 bp, unidentified
  source 1..54: mol_type = other DNA
cagtgctggccaaaaagatatccacttttggttttttgtgtgtaacttttttct

SEQ ID NO: 151 - DNA, 54 bp, unidentified
  source 1..54: mol_type = other DNA
agaaaaaagttacacacaaaaaaccaaaagtggatatctttttggccagcactg

SEQ ID NO: 152 - DNA, 54 bp, unidentified
  source 1..54: mol_type = other DNA
gtcacgaccggtttttctataggtgaaaaccaaaaaacacacattgaaaaaaga

SEQ ID NO: 153 - DNA, 54 bp, unidentified
  source 1..54: mol_type = other DNA
tcttttttcaatgtgtgttttttggttttcacctatagaaaaaccggtcgtgac

SEQ ID NO: 154 - DNA, 32 bp, unidentified
  source 1..32: mol_type = other DNA
nngttgaagtcggaagtttacatacacttaag

SEQ ID NO: 155 - DNA, 32 bp, unidentified
  source 1..32: mol_type = other DNA
cttaagtgtatgtaaacttccgacttcaacnn

SEQ ID NO: 156 - DNA, 32 bp, unidentified
  source 1..32: mol_type = other DNA
nngttgaagtcggaagtttacatacaccttag

SEQ ID NO: 157 - DNA, 32 bp, unidentified
  source 1..32: mol_type = other DNA
ctaaggtgtatgtaaacttccgacttcaacnn

SEQ ID NO: 158 - DNA, 22 bp, unidentified
  source 1..22: mol_type = other DNA
ctttcgcgtttttcgtgcgccg

SEQ ID NO: 159 - DNA, 22 bp, unidentified
  source 1..22: mol_type = other DNA
cggcgcacgaaaaacgcgaaag

SEQ ID NO: 160 - DNA, 22 bp, unidentified
  source 1..22: mol_type = other DNA
ttttcgcatttatcgtgaaacg

SEQ ID NO: 161 - DNA, 22 bp, unidentified
  source 1..22: mol_type = other DNA
cgtttcacgataaatgcgaaaa

SEQ ID NO: 162 - DNA, 22 bp, unidentified
  source 1..22: mol_type = other DNA
ctttcgcgtttttcgtgcgccg

SEQ ID NO: 163 - DNA, 22 bp, unidentified
  source 1..22: mol_type = other DNA
cggcgcacgaaaaacgcgaaag

SEQ ID NO: 164 - DNA, 23 bp, unidentified
  source 1..23: mol_type = other DNA
gttttcgcatttatcgtgaaacg

SEQ ID NO: 165 - DNA, 23 bp, unidentified
  source 1..23: mol_type = other DNA
cgtttcacgataaatgcgaaaac

SEQ ID NO: 166 - DNA, 22 bp, unidentified
  source 1..22: mol_type = other DNA
ctttcgcgtttttcgtgcgccg

SEQ ID NO: 167 - DNA, 22 bp, unidentified
  source 1..22: mol_type = other DNA
cggcgcacgaaaaacgcgaaag

SEQ ID NO: 168 - DNA, 22 bp, unidentified
  source 1..22: mol_type = other DNA
ttttcgcatttatcgtgaaacg

SEQ ID NO: 169 - DNA, 22 bp, unidentified
  source 1..22: mol_type = other DNA
cgtttcacgataaatgcgaaaa

SEQ ID NO: 170 - DNA, 38 bp, unidentified
  source 1..38: mol_type = other DNA
gaaagcgcaaaaagcacgcggcgcaaaaagcacgcggc

SEQ ID NO: 171 - DNA, 44 bp, unidentified
  source 1..44: mol_type = other DNA
gccgcgtgctttttgcgctttcgccgcgtgctttttgcgctttc

SEQ ID NO: 172 - DNA, 22 bp, unidentified
  source 1..22: mol_type = other DNA
ctttcgcgtttttcgtgcgccg

SEQ ID NO: 173 - DNA, 22 bp, unidentified
  source 1..22: mol_type = other DNA
cggcgcacgaaaaacgcgaaag

SEQ ID NO: 174 - DNA, 41 bp, unidentified
  source 1..41: mol_type = other DNA
tgtggggggacaaaaaagtctcaaactggacaaaaaagatc

SEQ ID NO: 175 - DNA, 41 bp, unidentified
  source 1..41: mol_type = other DNA
gatcttttttgtccagtttgagacttttttgtccgcccaca

SEQ ID NO: 176 - DNA, 41 bp, unidentified
  source 1..41: mol_type = other DNA
gatctattttgttcagttcaagactttattgtccgcccaca

SEQ ID NO: 177 - DNA, 41 bp, unidentified
  source 1..41: mol_type = other DNA
tgtgggcggacaataaagtcttgaactgaacaaaatagatc

SEQ ID NO: 178 - DNA, 50 bp, unidentified
  source 1..50: mol_type = other DNA
ggggtttggggagcaacggaaccaaaaaccaacgtaaggcttagctagag

SEQ ID NO: 179 - DNA, 50 bp, unidentified
  source 1..50: mol_type = other DNA
ctctagctaagccttacgttggtttttggttccgttgctccccaaacccc

SEQ ID NO: 180 - DNA, 50 bp, unidentified
  source 1..50: mol_type = other DNA
ggggtttggggagcaacggaacagaaagtgcacttaagcccagcgcctgc

SEQ ID NO: 181 - DNA, 50 bp, unidentified
  source 1..50: mol_type = other DNA
gcaggcgctgggcttaagtgcactttctgttccgttgctccccaaacccc

SEQ ID NO: 182 - DNA, 50 bp, unidentified
  source 1..50: mol_type = other DNA
ggggtttggggagcaacggaaccaaaaaccaacttaaggcttagctagag

SEQ ID NO: 183 - DNA, 50 bp, unidentified
  source 1..50: mol_type = other DNA
ctctagctaagccttaagttggtttttggttccgttgctccccaaacccc

SEQ ID NO: 184 - DNA, 50 bp, unidentified; identical to SEQ ID NO: 180
  source 1..50: mol_type = other DNA

SEQ ID NO: 185 - DNA, 50 bp, unidentified; identical to SEQ ID NO: 181
  source 1..50: mol_type = other DNA

SEQ ID NO: 186 - DNA, 50 bp, unidentified
  source 1..50: mol_type = other DNA
ggggtttggggagcaacggaaccaaaaaccaacgtaaggcttaccaacgc

SEQ ID NO: 187 - DNA, 50 bp, unidentified
  source 1..50: mol_type = other DNA
gcgttggtaagccttacgttggtttttggttccgttgctccccaaacccc

SEQ ID NO: 188 - DNA, 49 bp, unidentified
  source 1..49: mol_type = other DNA
ggggtttggggagcaatggaaccaaaaaccaacgtaagctctgaatccc

SEQ ID NO: 189 - DNA, 49 bp, unidentified
  source 1..49: mol_type = other DNA
gggattcagagcttacgttggtttttggttccattgctccccaaacccc

SEQ ID NO: 190 - DNA, 50 bp, unidentified
  source 1..50: mol_type = other DNA
ggggtttggggagcaacggaaccaaaaaccaacgtaaggcttaccacctg

SEQ ID NO: 191 - DNA, 50 bp, unidentified
  source 1..50: mol_type = other DNA
caggtggtaagccttacgttggtttttggttccgttgctccccaaacccc

SEQ ID NO: 192 - DNA, 49 bp, unidentified
  source 1..49: mol_type = other DNA
ggggtttggggagcaaggaaccaaaaaccaacgtaagccctaccagcgc

SEQ ID NO: 193 - DNA, 49 bp, unidentified
  source 1..49: mol_type = other DNA
gcgctggtagggcttacgttggtttttggttccttgctccccaaacccc

SEQ ID NO: 194 - skipped

SEQ ID NO: 195 - DNA, 12 bp, unidentified
  source 1..12: mol_type = other DNA
gcggcgatcggc

SEQ ID NO: 196-197 - skipped (2 entries)

SEQ ID NO: 198 - DNA, 218 bp, unidentified
  source 1..218: mol_type = other DNA
agatgtgtataagagacaggtagtgtatttttttttttttttttatcatcctgtctcttatacacatctttttttttttttttttttttttggcgatcgcttttttttttttttttgctagaaagagtactgttctggaaactgacttttttttttttttttgcgatcgcctttttttttttttgatacatttagatgtgtataagagacaggatgat

SEQ ID NO: 199 - DNA, 221 bp, unidentified
  source 1..221: mol_type = other DNA
cacgtgctgtctcttatacacatcttttctcgatcattattattttttggcgatcgcttttttttttttttttgttgagaatggtgctagtggtagtgaacagttttttttttttttttgcgatcgcctttttttttttttttttttttagatgtgtataagagacagcacgtgttttttttttttttttttttgacgaatactgtctcttatacacatct

SEQ ID NO: 200 - DNA, 4695 bp, unidentified
  source 1..4695: mol_type = other DNA
tacactacctgtctcttatacacatctttttttttttttttttttttttggttacatgcatcagtcaataatgctttttttattttttttatttttttagatgcctccacagcatgaatgtactactcctttttcttcccctcccaccctcattgcatcccaggcttcccctgctccccacccccatgacagacatttttgatgattatcaacagaaactttatttctcatcggttcaggaacaatcggagggtagatggaaagaggaagggagggaaagagggagggaggaagaatcctgcgaaaaggaagggccagactgagggagaagaaaaacatgttcggggcaaaagggtaattctcaagtggggaatgccaaatgaaggggtgcttacatgggggcacaaaattccaaatcagccacagtggggtgaggtgagtatgagacgcaggtgggttgaatgaaggaaagttagtaccacttagggctacaggaccctggggttcttctgtcagaggattggggttcaggtttcaggctttagggtgtaacatgggggggcccagtaggggctatgctggttgcatggggaggccccaggcccctccccaagggcccctccttttgggggaatctcactgacgaggcagagtcgttcactgtagtctggctgcagactctcagccagtcccttagacacaccactccaggcctaaagacagatatgtccaggtcaggggtcaattaggggcaggaagtaaaagaccgagctctgtgccaaaggagtactcatgatgtctgcaaccactgtaattgattacagaagggatacacaggctcctgggcccccaataccagttgccatctgcctcattcaatctataatctgcacttctgtgtgtgtctctctctgtatagtccatgccccatttggtcggccacatcctgacagttagtgcagggcctccttccctctcctctctgcccccacccccacactctgtctgtcttgctggcaggcagttggcagttgatagactgcagcatgcttatgacagcgttctcaccgaaaagttcccgtggtattcagtaacaagatcctctaggttcttcagggtgggaattcggggcatcgtcctgacaggggagaaagagggagcaggagcacataggttaaagcttttttatcacccttctcccagttgtcccatatgaaataaagtgattctgtgttctctgtgcctgtggcttccttccatcaccaaaccctcttgggtaatctctcattacttactgtctcatcctttactcctaaagaccctgcaaaaccctcctctgctattgtcagctaccgttcccctcatttttctgggcttctccaaatctcaccgttccagccagaaatacacacagagaaggctgataatcaatcccatggagccaacagagataaccacggcttccaatgcaaacaggaaaggattctctatagaaaaaagaaaagcaaagtggaccttatatttgttgtgcccctactacatgccaggcactggtgccaggcaccgcgctaaagacatactctctgtttaatcctcacaacagctcctgtgaggcaggaacaattacctccatcttacatcttaggaaacagaatccaagagtttagggatgtggccaaggccaaagaggtagtatgtggcacagcctagatccagctggttccaaagccatcttcaccttgcaggctctctaggaatgcttcagggaaatcctatacattctatagcccccttgagtacccctcagcctccttctcaatccactcccctactctaacaacacgctaacccaaccctacacagaaaaaccttgatttctagaggttggggttagacagtgtggagagatggggcaccaagtttaggggctttagtgacagggaagtggagcaaaagacagtggtgttagaaaggctggggtgttgggctcatggattgggtcatgtgggcccattttaccttttgaagtattgctcccccagtggattgggtggctccattcactccaatgctgagcacttccacagagtgggttaaagcggctccgaacacgaaacgtgtagcgtttctgcccatccacactaggcaaggagaacttatgtctataatccactgattgttccttgaggagaaagaggatgagggaaagtgggtgtctatgagagaagggagaattaaaacatactcctgaacacccaccagtgtcatctctgctactgcccagtttctctctcatctcttgactactcaagccacactgctcccttcactgacttgaatctaatgcctcccctctggatccccttaatggcttccttttgtttacttgtctatctggtatcaggaagagtatgggtagggaatccctaatgaaaactcactggtgtcaggaatggtggctcacgcctgtaatcccagcactttgggaggccgaggtgggcagatcacctgaggtcaggagttcaagaccagcctgaccaacatggcaaaaccctgtctttactaaaaatacaaaaattagccaggcatggttgtgcatgctcccagctacttgggaggctgaagcaggagaatcacttgaaccagggagacagaggtcgcagtgagcccaagatcgccccactgcactcaagcctgggcaacagagtgaggctctgtctcaaaaaaaaaaaaaaaagaaagaaagaaagaaaagaaaagaaaaaaagaaaactcactggagaaaataggggggaaaggagttggaggagggagggtagggggtgagcagagaagctgggaggcagagaacaggagcttgatattaggtccttctatctgtctggttgaatcctttagccctactttcttggccttagctgctacattcacgtccctagtcactcacagtccagctgtggtcccagtcagtccggtactgcaccaagtgctccaaacagtggttcaagaatctgttgttccagttcagttctagctgggattcactcagtttgtgaagtgttaggttctctggagcccaggggatcactggagatatgtgtgcatatgtggtcattcccctggcctagacaagtcaggatcctgaaggtagtgcccctaatacctcctcccttcccatcatgatcccctacctcctcttttctgcccatgtacccttatgataaaagaacactactctgtagactccaatgtcccacagtatccctggtctcttgaccctttctttccaaattacccagattctgcagttttagcatctgtgtggcctgtctcctgggttcccgtgggtcctggagctgaacaacaaatgtttggtagaggtggatctcctttttttgcaactgacagccagaagtgatttcttcagagaatagatagtggctgcacttctggactttatcattatccgagttcttgtacctagaggagaaaggttggaaggaagaggaacagtggggccaatctgggtactgcagatatccagagcctagcctcatctcccctcaaccgacttatgacttaccccaggagaaaacagtggggtacctgggagacttgctaccctctctcttggtctctgatccaacccacctcttcttcatcccctccccctcgtcccttctcataccaataatgcagagtgaggttggtaggctggggctcagagctgctgttccaagtgcaattcatgtactcgacattgaacacaaaacactgaacctctgggaggggcagagtggaaacactgagggagtcagtgggcatagtggtcaggaagaaatctagattggggagaaaatgaaggcagggagggaaagagaaatgatggtcagaaggaggaggccaagcacggtggctcatgtctgtaatcctggtgctttgaaaggctgaggcaggaggatcactagaggccaggagtttgagaccagcctaggcaacatagtgagaccctgcctcaaaagaaagaaagaaacaaacaaacaagaaagaaagaaagaagaagtagcgtgaggcagggaaccctcccccttgcccttcccactccacttttcaattctgcccacatgattgtaatggccagtggcaggcaccagatctctgtacggccccttcccacagccacccttctcaccagccccctccagtcccagatttcccaccagctgtggtgtcttcattcccattgggcgtcagaattgtcgtgttcagccccactcccagcaggggcagctgcaggaataagagggatgtgaatggtaatgatggcttcaacatggcgcttgctcttcattccctgggtgtagtctgtctgtgtcaggaacctgggtccctcacccactacccctccccacccacacgtttcctctgtcatagcttccggtggaaagaaccttataaaccagggctttacagagggtgtggcaaatatgtgctgtgtgacacgggctaagtcctctaggagattaggtgctgctgtaaggtggtaaacagaaactaaagctggatatacaatagtgtcacagactcaaaaatcctcagcccacctagatcctgggaaggatctgttcactgcggccgcatgttctttttttttttttttttttttttagatgtgtataagagacagtattcgtc

SEQ ID NO: 201 - DNA, 221 bp, unidentified
  source 1..221: mol_type = other DNA
cacgtgctgtctcttatacacatcttttctcgatcattattattttttggcgatcgcttttttttttttttttagcaaattggtaatactcctgcctccacagttttttttttttttttgcgatcgcctttttttttttttttttttttagatgtgtataagagacagcacgtgttttttttttttttttttttcagctatactgtctcttatacacatct

SEQ ID NO: 202 - DNA, 218 bp, unidentified
  source 1..218: mol_type = other DNA
agatgtgtataagagacagagtatgaatttttttttttttttttatcatcctgtctcttatacacatctttttttttttttttttttttttggcgatcgcttttttttttttttttccttctcctctaaatcattaccttctataattttttttttttttttgcgatcgcctttttttttttttgatacatttagatgtgtataagagacaggatgat

SEQ ID NO: 203 - DNA, 4694 bp, unidentified
  source 1..4694: mol_type = other DNA
ttcatactctgtctcttatacacatctttttttttttttttttttttttgaacatgcggccgcgtgaacagatccttcccaggatctaggtgggctgaggatttttgagtctgtgacactattgtatatccagctttagtttctgtttaccaccttacagcagcacctaatctcctagaggacttagcccgtgtcacacagcacatatttgccacaccctctgtaaagccctggtttataaggttctttccaccggaagctatgacagaggaaacgtgtgggtggggaggggtagtgggtgagggacccaggttcctgacacagacagactacacccagggaatgaagagcaagcgccatgttgaagccatcattaccattcacatccctcttattcctgcagctgcccctgctgggagtggggctgaacacgacaattctgacgcccaatgggaatgaagacaccacagctggtgggaaatctgggactggagggggctggtgagaagggtggctgtgggaaggggccgtacagagatctggtgcctgccactggccattacaatcatgtgggcagaattgaaaagtggagtgggaagggcaagggggagggttccctgcctcacgctacttcttctttctttctttcttgtttgtttgtttctttctttcttttgaggcagggtctcactatgttgcctaggctggtctcaaactcctggcctctagtgatcctcctgcctcagcctttcaaagcaccaggattacagacatgagccaccgtgcttggcctcctccttctgaccatcatttctctttccctccctgccttcattttctccccaatctagatttcttcctgaccactatgcccactgactccctcagtgtttccactctgcccctcccagaggttcagtgttttgtgttcaatgtcgagtacatgaattgcacttggaacagcagctctgagccccagcctaccaacctcactctgcattattggtatgagaagggacgagggggaggggatgaagaagaggtgggttggatcagagaccaagagagagggtagcaagtctcccaggtaccccactgttttctcctggggtaagtcataagtcggttgaggggagatgaggctaggctctggatatctgcagtacccagattggccccactgttcctcttccttccaacctttctcctctaggtacaagaactcggataatgataaagtccagaagtgcagccactatctattctctgaagaaatcacttctggctgtcagttgcaaaaaaaggagatccacctctaccaaacatttgttgttcagctccaggacccacgggaacccaggagacaggccacacagatgctaaaactgcagaatctgggtaatttggaaagaaagggtcaagagaccagggatactgtgggacattggagtctacagagtagtgttcttttatcataagggtacatgggcagaaaagaggaggtaggggatcatgatgggaagggaggaggtattaggggcactaccttcaggatcctgacttgtctaggccaggggaatgaccacatatgcacacatatctccagtgatcccctgggctccagagaacctaacacttcacaaactgagtgaatcccagctagaactgaactggaacaacagattcttgaaccactgtttggagcacttggtgcagtaccggactgactgggaccacagctggactgtgagtgactagggacgtgaatgtagcagctaaggccaagaaagtagggctaaaggattcaaccagacagatagaaggacctaatatcaagctcctgttctctgcctcccagcttctctgctcaccccctaccctccctcctccaactcctttcccccctattttctccagtgagttttctttttttcttttcttttctttctttctttcttttttttttttttttgagacagagcctcactctgttgcccaggcttgagtgcagtggggcgatcttgggctcactgcgacctctgtctccctggttcaagtgattctcctgcttcagcctcccaagtagctgggagcatgcacaaccatgcctggctaatttttgtatttttagtaaagacagggttttgccatgttggtcaggctggtcttgaactcctgacctcaggtgatctgcccacctcggcctcccaaagtgctgggattacaggcgtgagccaccattcctgacaccagtgagttttcattagggattccctacccatactcttcctgataccagatagacaagtaaacaaaaggaagccattaaggggatccagaggggaggcattagattcaagtcagtgaagggagcagtgtggcttgagtagtcaagagatgagagagaaactgggcagtagcagagatgacactggtgggtgttcaggagtatgttttaattctcccttctctcatagacacccactttccctcatcctctttctcctcaaggaacaatcagtggattatagacataagttctccttgcctagtgtggatgggcagaaacgctacacgtttcgtgttcggagccgctttaacccactctgtggaagtgctcagcattggagtgaatggagccacccaatccactgggggagcaatacttcaaaaggtaaaatgggcccacatgacccaatccatgagcccaacaccccagcctttctaacaccactgtcttttgctccacttccctgtcactaaagcccctaaacttggtgccccatctctccacactgtctaaccccaacctctagaaatcaaggtttttctgtgtagggttgggttagcgtgttgttagagtaggggagtggattgagaaggaggctgaggggtactcaagggggctatagaatgtataggatttccctgaagcattcctagagagcctgcaaggtgaagatggctttggaaccagctggatctaggctgtgccacatactacctctttggccttggccacatccctaaactcttggattctgtttcctaagatgtaagatggaggtaattgttcctgcctcacaggagctgttgtgaggattaaacagagagtatgtctttagcgcggtgcctggcaccagtgcctggcatgtagtaggggcacaacaaatataaggtccactttgcttttcttttttctatagagaatcctttcctgtttgcattggaagccgtggttatctctgttggctccatgggattgattatcagccttctctgtgtgtatttctggctggaacggtgagatttggagaagcccagaaaaatgaggggaacggtagctgacaatagcagaggagggttttgcagggtctttaggagtaaaggatgagacagtaagtaatgagagattacccaagagggtttggtgatggaaggaagccacaggcacagagaacacagaatcactttatttcatatgggacaactgggagaagggtgataaaaaagctttaacctatgtgctcctgctccctctttctcccctgtcaggacgatgccccgaattcccaccctgaagaacctagaggatcttgttactgaataccacgggaacttttcggtgagaacgctgtcataagcatgctgcagtctatcaactgccaactgcctgccagcaagacagacagagtgtgggggtgggggcagagaggagagggaaggaggccctgcactaactgtcaggatgtggccgaccaaatggggcatggactatacagagagagacacacacagaagtgcagattatagattgaatgaggcagatggcaactggtattgggggcccaggagcctgtgtatcccttctgtaatcaattacagtggttgcagacatcatgagtactcctttggcacagagctcggtcttttacttcctgcccctaattgacccctgacctggacatatctgtctttaggcctggagtggtgtgtctaagggactggctgagagtctgcagccagactacagtgaacgactctgcctcgtcagtgagattcccccaaaaggaggggcccttggggaggggcctggggcctccccatgcaaccagcatagcccctactgggcccccccatgttacaccctaaagcctgaaacctgaaccccaatcctctgacagaagaaccccagggtcctgtagccctaagtggtactaactttccttcattcaacccacctgcgtctcatactcacctcaccccactgtggctgatttggaattttgtgcccccatgtaagcaccccttcatttggcattccccacttgagaattacccttttgccccgaacatgtttttcttctccctcagtctggcccttccttttcgcaggattcttcctccctccctctttccctcccttcctctttccatctaccctccgattgttcctgaaccgatgagaaataaagtttctgttgataatcatcaaaaatgtctgtcatgggggtggggagcaggggaagcctgggatgcaatgagggtgggaggggaagaaaaaggagtagtacattcatgctgtggaggcatctaaaaaaataaaaaaaataaaaaaagcattattgactgatgcatgtaacctttttttttttttttttttttttagatgtgtataagagacagtatagctg

SEQ ID NO: 204 - DNA, 218 bp, unidentified
  source 1..218: mol_type = other DNA
ctgtctcttatacacatctgtagtgtatttttttttttttttttatcatcagatgtgtataagagacagttttttttttttttttttttttggcgatcgcttttttttttttttttgctagaaagagtactgttctggaaactgacttttttttttttttttgcgatcgcctttttttttttttgatacatttctgtctcttatacacatctgatgat

SEQ ID NO: 205 - DNA, 221 bp, unidentified
  source 1..221: mol_type = other DNA
cacgtgagatgtgtataagagacagtttctcgatcattattattttttggcgatcgcttttttttttttttttgttgagaatggtgctagtggtagtgaacagttttttttttttttttgcgatcgcctttttttttttttttttttttctgtctcttatacacatctcacgtgttttttttttttttttttttgacgaataagatgtgtataagagacag

SEQ ID NO: 206 - DNA, 4695 bp, unidentified
  source 1..4695: mol_type = other DNA
tacactacagatgtgtataagagacagttttttttttttttttttttttggttacatgcatcagtcaataatgctttttttattttttttatttttttagatgcctccacagcatgaatgtactactcctttttcttcccctcccaccctcattgcatcccaggcttcccctgctccccacccccatgacagacatttttgatgattatcaacagaaactttatttctcatcggttcaggaacaatcggagggtagatggaaagaggaagggagggaaagagggagggaggaagaatcctgcgaaaaggaagggccagactgagggagaagaaaaacatgttcggggcaaaagggtaattctcaagtggggaatgccaaatgaaggggtgcttacatgggggcacaaaattccaaatcagccacagtggggtgaggtgagtatgagacgcaggtgggttgaatgaaggaaagttagtaccacttagggctacaggaccctggggttcttctgtcagaggattggggttcaggtttcaggctttagggtgtaacatgggggggcccagtaggggctatgctggttgcatggggaggccccaggcccctccccaagggcccctccttttgggggaatctcactgacgaggcagagtcgttcactgtagtctggctgcagactctcagccagtcccttagacacaccactccaggcctaaagacagatatgtccaggtcaggggtcaattaggggcaggaagtaaaagaccgagctctgtgccaaaggagtactcatgatgtctgcaaccactgtaattgattacagaagggatacacaggctcctgggcccccaataccagttgccatctgcctcattcaatctataatctgcacttctgtgtgtgtctctctctgtatagtccatgccccatttggtcggccacatcctgacagttagtgcagggcctccttccctctcctctctgcccccacccccacactctgtctgtcttgctggcaggcagttggcagttgatagactgcagcatgcttatgacagcgttctcaccgaaaagttcccgtggtattcagtaacaagatcctctaggttcttcagggtgggaattcggggcatcgtcctgacaggggagaaagagggagcaggagcacataggttaaagcttttttatcacccttctcccagttgtcccatatgaaataaagtgattctgtgttctctgtgcctgtggcttccttccatcaccaaaccctcttgggtaatctctcattacttactgtctcatcctttactcctaaagaccctgcaaaaccctcctctgctattgtcagctaccgttcccctcatttttctgggcttctccaaatctcaccgttccagccagaaatacacacagagaaggctgataatcaatcccatggagccaacagagataaccacggcttccaatgcaaacaggaaaggattctctatagaaaaaagaaaagcaaagtggaccttatatttgttgtgcccctactacatgccaggcactggtgccaggcaccgcgctaaagacatactctctgtttaatcctcacaacagctcctgtgaggcaggaacaattacctccatcttacatcttaggaaacagaatccaagagtttagggatgtggccaaggccaaagaggtagtatgtggcacagcctagatccagctggttccaaagccatcttcaccttgcaggctctctaggaatgcttcagggaaatcctatacattctatagcccccttgagtacccctcagcctccttctcaatccactcccctactctaacaacacgctaacccaaccctacacagaaaaaccttgatttctagaggttggggttagacagtgtggagagatggggcaccaagtttaggggctttagtgacagggaagtggagcaaaagacagtggtgttagaaaggctggggtgttgggctcatggattgggtcatgtgggcccattttaccttttgaagtattgctcccccagtggattgggtggctccattcactccaatgctgagcacttccacagagtgggttaaagcggctccgaacacgaaacgtgtagcgtttctgcccatccacactaggcaaggagaacttatgtctataatccactgattgttccttgaggagaaagaggatgagggaaagtgggtgtctatgagagaagggagaattaaaacatactcctgaacacccaccagtgtcatctctgctactgcccagtttctctctcatctcttgactactcaagccacactgctcccttcactgacttgaatctaatgcctcccctctggatccccttaatggcttccttttgtttacttgtctatctggtatcaggaagagtatgggtagggaatccctaatgaaaactcactggtgtcaggaatggtggctcacgcctgtaatcccagcactttgggaggccgaggtgggcagatcacctgaggtcaggagttcaagaccagcctgaccaacatggcaaaaccctgtctttactaaaaatacaaaaattagccaggcatggttgtgcatgctcccagctacttgggaggctgaagcaggagaatcacttgaaccagggagacagaggtcgcagtgagcccaagatcgccccactgcactcaagcctgggcaacagagtgaggctctgtctcaaaaaaaaaaaaaaaagaaagaaagaaagaaaagaaaagaaaaaaagaaaactcactggagaaaataggggggaaaggagttggaggagggagggtagggggtgagcagagaagctgggaggcagagaacaggagcttgatattaggtccttctatctgtctggttgaatcctttagccctactttcttggccttagctgctacattcacgtccctagtcactcacagtccagctgtggtcccagtcagtccggtactgcaccaagtgctccaaacagtggttcaagaatctgttgttccagttcagttctagctgggattcactcagtttgtgaagtgttaggttctctggagcccaggggatcactggagatatgtgtgcatatgtggtcattcccctggcctagacaagtcaggatcctgaaggtagtgcccctaatacctcctcccttcccatcatgatcccctacctcctcttttctgcccatgtacccttatgataaaagaacactactctgtagactccaatgtcccacagtatccctggtctcttgaccctttctttccaaattacccagattctgcagttttagcatctgtgtggcctgtctcctgggttcccgtgggtcctggagctgaacaacaaatgtttggtagaggtggatctcctttttttgcaactgacagccagaagtgatttcttcagagaatagatagtggctgcacttctggactttatcattatccgagttcttgtacctagaggagaaaggttggaaggaagaggaacagtggggccaatctgggtactgcagatatccagagcctagcctcatctcccctcaaccgacttatgacttaccccaggagaaaacagtggggtacctgggagacttgctaccctctctcttggtctctgatccaacccacctcttcttcatcccctccccctcgtcccttctcataccaataatgcagagtgaggttggtaggctggggctcagagctgctgttccaagtgcaattcatgtactcgacattgaacacaaaacactgaacctctgggaggggcagagtggaaacactgagggagtcagtgggcatagtggtcaggaagaaatctagattggggagaaaatgaaggcagggagggaaagagaaatgatggtcagaaggaggaggccaagcacggtggctcatgtctgtaatcctggtgctttgaaaggctgaggcaggaggatcactagaggccaggagtttgagaccagcctaggcaacatagtgagaccctgcctcaaaagaaagaaagaaacaaacaaacaagaaagaaagaaagaagaagtagcgtgaggcagggaaccctcccccttgcccttcccactccacttttcaattctgcccacatgattgtaatggccagtggcaggcaccagatctctgtacggccccttcccacagccacccttctcaccagccccctccagtcccagatttcccaccagctgtggtgtcttcattcccattgggcgtcagaattgtcgtgttcagccccactcccagcaggggcagctgcaggaataagagggatgtgaatggtaatgatggcttcaacatggcgcttgctcttcattccctgggtgtagtctgtctgtgtcaggaacctgggtccctcacccactacccctccccacccacacgtttcctctgtcatagcttccggtggaaagaaccttataaaccagggctttacagagggtgtggcaaatatgtgctgtgtgacacgggctaagtcctctaggagattaggtgctgctgtaaggtggtaaacagaaactaaagctggatatacaatagtgtcacagactcaaaaatcctcagcccacctagatcctgggaaggatctgttcactgcggccgcatgttctttttttttttttttttttttttctgtctcttatacacatcttattcgtc

SEQ ID NO: 207 - DNA, 221 bp, unidentified
  source 1..221: mol_type = other DNA
cacgtgagatgtgtataagagacagtttctcgatcattattattttttggcgatcgcttttttttttttttttagcaaattggtaatactcctgcctccacagttttttttttttttttgcgatcgcctttttttttttttttttttttctgtctcttatacacatctcacgtgttttttttttttttttttttcagctataagatgtgtataagagacag

SEQ ID NO: 208 - DNA, 218 bp, unidentified
  source 1..218: mol_type = other DNA
ctgtctcttatacacatctagtatgaatttttttttttttttttatcatcagatgtgtataagagacagttttttttttttttttttttttggcgatcgcttttttttttttttttccttctcctctaaatcattaccttctataattttttttttttttttgcgatcgcctttttttttttttgatacatttctgtctcttatacacatctgatgat

SEQ ID NO: 209 - DNA, 4694 bp, unidentified
  source 1..4694: mol_type = other DNA
ttcatactagatgtgtataagagacagttttttttttttttttttttttgaacatgcggccgcgtgaacagatccttcccaggatctaggtgggctgaggatttttgagtctgtgacactattgtatatccagctttagtttctgtttaccaccttacagcagcacctaatctcctagaggacttagcccgtgtcacacagcacatatttgccacaccctctgtaaagccctggtttataaggttctttccaccggaagctatgacagaggaaacgtgtgggtggggaggggtagtgggtgagggacccaggttcctgacacagacagactacacccagggaatgaagagcaagcgccatgttgaagccatcattaccattcacatccctcttattcctgcagctgcccctgctgggagtggggctgaacacgacaattctgacgcccaatgggaatgaagacaccacagctggtgggaaatctgggactggagggggctggtgagaagggtggctgtgggaaggggccgtacagagatctggtgcctgccactggccattacaatcatgtgggcagaattgaaaagtggagtgggaagggcaagggggagggttccctgcctcacgctacttcttctttctttctttcttgtttgtttgtttctttctttcttttgaggcagggtctcactatgttgcctaggctggtctcaaactcctggcctctagtgatcctcctgcctcagcctttcaaagcaccaggattacagacatgagccaccgtgcttggcctcctccttctgaccatcatttctctttccctccctgccttcattttctccccaatctagatttcttcctgaccactatgcccactgactccctcagtgtttccactctgcccctcccagaggttcagtgttttgtgttcaatgtcgagtacatgaattgcacttggaacagcagctctgagccccagcctaccaacctcactctgcattattggtatgagaagggacgagggggaggggatgaagaagaggtgggttggatcagagaccaagagagagggtagcaagtctcccaggtaccccactgttttctcctggggtaagtcataagtcggttgaggggagatgaggctaggctctggatatctgcagtacccagattggccccactgttcctcttccttccaacctttctcctctaggtacaagaactcggataatgataaagtccagaagtgcagccactatctattctctgaagaaatcacttctggctgtcagttgcaaaaaaaggagatccacctctaccaaacatttgttgttcagctccaggacccacgggaacccaggagacaggccacacagatgctaaaactgcagaatctgggtaatttggaaagaaagggtcaagagaccagggatactgtgggacattggagtctacagagtagtgttcttttatcataagggtacatgggcagaaaagaggaggtaggggatcatgatgggaagggaggaggtattaggggcactaccttcaggatcctgacttgtctaggccaggggaatgaccacatatgcacacatatctccagtgatcccctgggctccagagaacctaacacttcacaaactgagtgaatcccagctagaactgaactggaacaacagattcttgaaccactgtttggagcacttggtgcagtaccggactgactgggaccacagctggactgtgagtgactagggacgtgaatgtagcagctaaggccaagaaagtagggctaaaggattcaaccagacagatagaaggacctaatatcaagctcctgttctctgcctcccagcttctctgctcaccccctaccctccctcctccaactcctttcccccctattttctccagtgagttttctttttttcttttcttttctttctttctttcttttttttttttttttgagacagagcctcactctgttgcccaggcttgagtgcagtggggcgatcttgggctcactgcgacctctgtctccctggttcaagtgattctcctgcttcagcctcccaagtagctgggagcatgcacaaccatgcctggctaatttttgtatttttagtaaagacagggttttgccatgttggtcaggctggtcttgaactcctgacctcaggtgatctgcccacctcggcctcccaaagtgctgggattacaggcgtgagccaccattcctgacaccagtgagttttcattagggattccctacccatactcttcctgataccagatagacaagtaaacaaaaggaagccattaaggggatccagaggggaggcattagattcaagtcagtgaagggagcagtgtggcttgagtagtcaagagatgagagagaaactgggcagtagcagagatgacactggtgggtgttcaggagtatgttttaattctcccttctctcatagacacccactttccctcatcctctttctcctcaaggaacaatcagtggattatagacataagttctccttgcctagtgtggatgggcagaaacgctacacgtttcgtgttcggagccgctttaacccactctgtggaagtgctcagcattggagtgaatggagccacccaatccactgggggagcaatacttcaaaaggtaaaatgggcccacatgacccaatccatgagcccaacaccccagcctttctaacaccactgtcttttgctccacttccctgtcactaaagcccctaaacttggtgccccatctctccacactgtctaaccccaacctctagaaatcaaggtttttctgtgtagggttgggttagcgtgttgttagagtaggggagtggattgagaaggaggctgaggggtactcaagggggctatagaatgtataggatttccctgaagcattcctagagagcctgcaaggtgaagatggctttggaaccagctggatctaggctgtgccacatactacctctttggccttggccacatccctaaactcttggattctgtttcctaagatgtaagatggaggtaattgttcctgcctcacaggagctgttgtgaggattaaacagagagtatgtctttagcgcggtgcctggcaccagtgcctggcatgtagtaggggcacaacaaatataaggtccactttgcttttcttttttctatagagaatcctttcctgtttgcattggaagccgtggttatctctgttggctccatgggattgattatcagccttctctgtgtgtatttctggctggaacggtgagatttggagaagcccagaaaaatgaggggaacggtagctgacaatagcagaggagggttttgcagggtctttaggagtaaaggatgagacagtaagtaatgagagattacccaagagggtttggtgatggaaggaagccacaggcacagagaacacagaatcactttatttcatatgggacaactgggagaagggtgataaaaaagctttaacctatgtgctcctgctccctctttctcccctgtcaggacgatgccccgaattcccaccctgaagaacctagaggatcttgttactgaataccacgggaacttttcggtgagaacgctgtcataagcatgctgcagtctatcaactgccaactgcctgccagcaagacagacagagtgtgggggtgggggcagagaggagagggaaggaggccctgcactaactgtcaggatgtggccgaccaaatggggcatggactatacagagagagacacacacagaagtgcagattatagattgaatgaggcagatggcaactggtattgggggcccaggagcctgtgtatcccttctgtaatcaattacagtggttgcagacatcatgagtactcctttggcacagagctcggtcttttacttcctgcccctaattgacccctgacctggacatatctgtctttaggcctggagtggtgtgtctaagggactggctgagagtctgcagccagactacagtgaacgactctgcctcgtcagtgagattcccccaaaaggaggggcccttggggaggggcctggggcctccccatgcaaccagcatagcccctactgggcccccccatgttacaccctaaagcctgaaacctgaaccccaatcctctgacagaagaaccccagggtcctgtagccctaagtggtactaactttccttcattcaacccacctgcgtctcatactcacctcaccccactgtggctgatttggaattttgtgcccccatgtaagcaccccttcatttggcattccccacttgagaattacccttttgccccgaacatgtttttcttctccctcagtctggcccttccttttcgcaggattcttcctccctccctctttccctcccttcctctttccatctaccctccgattgttcctgaaccgatgagaaataaagtttctgttgataatcatcaaaaatgtctgtcatgggggtggggagcaggggaagcctgggatgcaatgagggtgggaggggaagaaaaaggagtagtacattcatgctgtggaggcatctaaaaaaataaaaaaaataaaaaaagcattattgactgatgcatgtaacctttttttttttttttttttttttctgtctcttatacacatcttatagctg

SEQ ID NO: 210 - DNA, 212 bp, unidentified
  source 1..212: mol_type = other DNA
agatgtgtataagagacaggtagtgtatttttttttttttttttatcatcctgtctcttatacacatctttttttttttttttttttttttgcgaccttttttttttttttttgctagaaagagtactgttctggaaactgacttttttttttttttttggtcgctttttttttttttgatacatttagatgtgtataagagacaggatgat

SEQ ID NO: 211 - DNA, 214 bp, unidentified
  source 1..214: mol_type = other DNA
cacgtgctgtctcttatacacatcttttctcgatcattattattttttgcgaccttttttttttttttttgttgagaatggtgctagtggtagtgaacagtttttttttttttttggtcgctttttttttttttttttttttagatgtgtataagagacagcacgtgttttttttttttttttttttgacgaatactgtctcttatacacatct

SEQ ID NO: 212 - DNA, 4695 bp, unidentified; identical to SEQ ID NO: 200
  source 1..4695: mol_type = other DNA

SEQ ID NO: 213 - DNA, 215 bp, unidentified
  source 1..215: mol_type = other DNA
cacgtgctgtctcttatacacatcttttctcgatcattattattttttgcgaccttttttttttttttttagcaaattggtaatactcctgcctccacagttttttttttttttttggtcgctttttttttttttttttttttagatgtgtataagagacagcacgtgttttttttttttttttttttcagctatactgtctcttatacacatct

SEQ ID NO: 214 - DNA, 212 bp, unidentified
  source 1..212: mol_type = other DNA
agatgtgtataagagacagagtatgaatttttttttttttttttatcatcctgtctcttatacacatctttttttttttttttttttttttgcgaccttttttttttttttttccttctcctctaaatcattaccttctataattttttttttttttttggtcgctttttttttttttgatacatttagatgtgtataagagacaggatgat

SEQ ID NO: 215 - DNA, 4694 bp, unidentified; identical to SEQ ID NO: 203
  source 1..4694: mol_type = other DNA

SEQ ID NO: 216 - DNA, 212 bp, unidentified
  source 1..212: mol_type = other DNA
ctgtctcttatacacatctgtagtgtatttttttttttttttttatcatcagatgtgtataagagacagttttttttttttttttttttttgcgaccttttttttttttttttgctagaaagagtactgttctggaaactgacttttttttttttttttggtcgctttttttttttttgatacatttctgtctcttatacacatctgatgat

SEQ ID NO: 217 - DNA, 215 bp, unidentified
  source 1..215: mol_type = other DNA
cacgtgagatgtgtataagagacagtttctcgatcattattattttttgcgaccttttttttttttttttgttgagaatggtgctagtggtagtgaacagttttttttttttttttggtcgctttttttttttttttttttttctgtctcttatacacatctcacgtgttttttttttttttttttttgacgaataagatgtgtataagagacag

SEQ ID NO: 218 - DNA, 4695 bp, unidentified; identical to SEQ ID NO: 206
  source 1..4695: mol_type = other DNA

SEQ ID NO: 219 - DNA, 215 bp, unidentified
  source 1..215: mol_type = other DNA
cacgtgagatgtgtataagagacagtttctcgatcattattattttttgcgaccttttttttttttttttagcaaattggtaatactcctgcctccacagttttttttttttttttggtcgctttttttttttttttttttttctgtctcttatacacatctcacgtgttttttttttttttttttttcagctataagatgtgtataagagacag

SEQ ID NO: 220 - DNA, 212 bp, unidentified
  source 1..212: mol_type = other DNA
ctgtctcttatacacatctagtatgaatttttttttttttttttatcatcagatgtgtataagagacagttttttttttttttttttttttgcgaccttttttttttttttttccttctcctctaaatcattaccttctataattttttttttttttttggtcgctttttttttttttgatacatttctgtctcttatacacatctgatgat

SEQ ID NO: 221 - DNA, 4694 bp, unidentified; identical to SEQ ID NO: 209
  source 1..4694: mol_type = other DNA

SEQ ID NO: 222 - DNA, 224 bp, unidentified
  source 1..224: mol_type = other DNA
agatgtgtataagagacaggtagtgtatttttttttttttttttatcatcctgtctcttatacacatctttttttttttttttttttttttgcggcgatcggcttttttttttttttttgctagaaagagtactgttctggaaactgacttttttttttttttttgccgatcgccgctttttttttttttgatacatttagatgtgtataagagacaggatgat

SEQ ID NO: 223 - DNA, 227 bp, unidentified
  source 1..227: mol_type = other DNA
cacgtgctgtctcttatacacatcttttctcgatcattattattttttgcggcgatcggcttttttttttttttttgttgagaatggtgctagtggtagtgaacagttttttttttttttttgccgatcgccgctttttttttttttttttttttagatgtgtataagagacagcacgtgttttttttttttttttttttgacgaatactgtctcttatacacatct

SEQ ID NO: 224 - DNA, 4695 bp, unidentified; identical to SEQ ID NO: 200
  source 1..4695: mol_type = other DNA

SEQ ID NO: 225 - DNA, 227 bp, unidentified
  source 1..227: mol_type = other DNA
cacgtgctgtctcttatacacatcttttctcgatcattattattttttgcggcgatcggcttttttttttttttttagcaaattggtaatactcctgcctccacagttttttttttttttttgccgatcgccgctttttttttttttttttttttagatgtgtataagagacagcacgtgttttttttttttttttttttcagctatactgtctcttatacacatct

SEQ ID NO: 226 - DNA, 224 bp, unidentified
  source 1..224: mol_type = other DNA
agatgtgtataagagacagagtatgaatttttttttttttttttatcatcctgtctcttatacacatctttttttttttttttttttttttgcggcgatcggcttttttttttttttttccttctcctctaaatcattaccttctataattttttttttttttttgccgatcgccgctttttttttttttgatacatttagatgtgtataagagacaggatgat

SEQ ID NO: 227 - DNA, 4694 bp, unidentified; identical to SEQ ID NO: 203
  source 1..4694: mol_type = other DNA

SEQ ID NO: 228 - DNA, 224 bp, unidentified
  source 1..224: mol_type = other DNA
ctgtctcttatacacatctgtagtgtatttttttttttttttttatcatcagatgtgtataagagacagttttttttttttttttttttttgcggcgatcggcttttttttttttttttgctagaaagagtactgttctggaaactgacttttttttttttttttgccgatcgccgctttttttttttttgatacatttctgtctcttatacacatctgatgat

SEQ ID NO: 229 - DNA, 227 bp, unidentified
  source 1..227: mol_type = other DNA
cacgtgagatgtgtataagagacagtttctcgatcattattattttttgcggcgatcggcttttttttttttttttgttgagaatggtgctagtggtagtgaacagttttttttttttttttgccgatcgccgctttttttttttttttttttttctgtctcttatacacatctcacgtgttttttttttttttttttttgacgaataagatgtgtataagagacag

SEQ ID NO: 230 - DNA, 4695 bp, unidentified; identical to SEQ ID NO: 206
  source 1..4695: mol_type = other DNA

SEQ ID NO: 231 - DNA, 227 bp, unidentified
  source 1..227: mol_type = other DNA
cacgtgagatgtgtataagagacagtttctcgatcattattattttttgcggcgatcggcttttttttttttttttagcaaattggtaatactcctgcctccacagttttttttttttttttgccgatcgccgctttttttttttttttttttttctgtctcttatacacatctcacgtgttttttttttttttttttttcagctataagatgtgtataagagacag

SEQ ID NO: 232 - DNA, 224 bp, unidentified
  source 1..224: mol_type = other DNA
ctgtctcttatacacatctagtatgaatttttttttttttttttatcatcagatgtgtataagagacagttttttttttttttttttttttgcggcgatcggcttttttttttttttttccttctcctctaaatcattaccttctataattttttttttttttttgccgatcgccgctttttttttttttgatacatttctgtctcttatacacatctgatgat

SEQ ID NO: 233 - DNA, 4695 bp, unidentified
  source 1..4695: mol_type = other DNA
ttcatactagatgtgtataagagacagttttttttttttttttttttttgaacatgcggccgcagtgaacagatccttcccaggatctaggtgggctgaggatttttgagtctgtgacactattgtatatccagctttagtttctgtttaccaccttacagcagcacctaatctcctagaggacttagcccgtgtcacacagcacatatttgccacaccctctgtaaagccctggtttataaggttctttccaccggaagctatgacagaggaaacgtgtgggtggggaggggtagtgggtgagggacccaggttcctgacacagacagactacacccagggaatgaagagcaagcgccatgttgaagccatcattaccattcacatccctcttattcctgcagctgcccctgctgggagtggggctgaacacgacaattctgacgcccaatgggaatgaagacaccacagctggtgggaaatctgggactggagggggctggtgagaagggtggctgtgggaaggggccgtacagagatctggtgcctgccactggccattacaatcatgtgggcagaattgaaaagtggagtgggaagggcaagggggagggttccctgcctcacgctacttcttctttctttctttcttgtttgtttgtttctttctttcttttgaggcagggtctcactatgttgcctaggctggtctcaaactcctggcctctagtgatcctcctgcctcagcctttcaaagcaccaggattacagacatgagccaccgtgcttggcctcctccttctgaccatcatttctctttccctccctgccttcattttctccccaatctagatttcttcctgaccactatgcccactgactccctcagtgtttccactctgcccctcccagaggttcagtgttttgtgttcaatgtcgagtacatgaattgcacttggaacagcagctctgagccccagcctaccaacctcactctgcattattggtatgagaagggacgagggggaggggatgaagaagaggtgggttggatcagagaccaagagagagggtagcaagtctcccaggtaccccactgttttctcctggggtaagtcataagtcggttgaggggagatgaggctaggctctggatatctgcagtacccagattggccccactgttcctcttccttccaacctttctcctctaggtacaagaactcggataatgataaagtccagaagtgcagccactatctattctctgaagaaatcacttctggctgtcagttgcaaaaaaaggagatccacctctaccaaacatttgttgttcagctccaggacccacgggaacccaggagacaggccacacagatgctaaaactgcagaatctgggtaatttggaaagaaagggtcaagagaccagggatactgtgggacattggagtctacagagtagtgttcttttatcataagggtacatgggcagaaaagaggaggtaggggatcatgatgggaagggaggaggtattaggggcactaccttcaggatcctgacttgtctaggccaggggaatgaccacatatgcacacatatctccagtgatcccctgggctccagagaacctaacacttcacaaactgagtgaatcccagctagaactgaactggaacaacagattcttgaaccactgtttggagcacttggtgcagtaccggactgactgggaccacagctggactgtgagtgactagggacgtgaatgtagcagctaaggccaagaaagtagggctaaaggattcaaccagacagatagaaggacctaatatcaagctcctgttctctgcctcccagcttctctgctcaccccctaccctccctcctccaactcctttcccccctattttctccagtgagttttctttttttcttttcttttctttctttctttcttttttttttttttttgagacagagcctcactctgttgcccaggcttgagtgcagtggggcgatcttgggctcactgcgacctctgtctccctggttcaagtgattctcctgcttcagcctcccaagtagctgggagcatgcacaaccatgcctggctaatttttgtatttttagtaaagacagggttttgccatgttggtcaggctggtcttgaactcctgacctcaggtgatctgcccacctcggcctcccaaagtgctgggattacaggcgtgagccaccattcctgacaccagtgagttttcattagggattccctacccatactcttcctgataccagatagacaagtaaacaaaaggaagccattaaggggatccagaggggaggcattagattcaagtcagtgaagggagcagtgtggcttgagtagtcaagagatgagagagaaactgggcagtagcagagatgacactggtgggtgttcaggagtatgttttaattctcccttctctcatagacacccactttccctcatcctctttctcctcaaggaacaatcagtggattatagacataagttctccttgcctagtgtggatgggcagaaacgctacacgtttcgtgttcggagccgctttaacccactctgtggaagtgctcagcattggagtgaatggagccacccaatccactgggggagcaatacttcaaaaggtaaaatgggcccacatgacccaatccatgagcccaacaccccagcctttctaacaccactgtcttttgctccacttccctgtcactaaagcccctaaacttggtgccccatctctccacactgtctaaccccaacctctagaaatcaaggtttttctgtgtagggttgggttagcgtgttgttagagtaggggagtggattgagaaggaggctgaggggtactcaagggggctatagaatgtataggatttccctgaagcattcctagagagcctgcaaggtgaagatggctttggaaccagctggatctaggctgtgccacatactacctctttggccttggccacatccctaaactcttggattctgtttcctaagatgtaagatggaggtaattgttcctgcctcacaggagctgttgtgaggattaaacagagagtatgtctttagcgcggtgcctggcaccagtgcctggcatgtagtaggggcacaacaaatataaggtccactttgcttttcttttttctatagagaatcctttcctgtttgcattggaagccgtggttatctctgttggctccatgggattgattatcagccttctctgtgtgtatttctggctggaacggtgagatttggagaagcccagaaaaatgaggggaacggtagctgacaatagcagaggagggttttgcagggtctttaggagtaaaggatgagacagtaagtaatgagagattacccaagagggtttggtgatggaaggaagccacaggcacagagaacacagaatcactttatttcatatgggacaactgggagaagggtgataaaaaagctttaacctatgtgctcctgctccctctttctcccctgtcaggacgatgccccgaattcccaccctgaagaacctagaggatcttgttactgaataccacgggaacttttcggtgagaacgctgtcataagcatgctgcagtctatcaactgccaactgcctgccagcaagacagacagagtgtgggggtgggggcagagaggagagggaaggaggccctgcactaactgtcaggatgtggccgaccaaatggggcatggactatacagagagagacacacacagaagtgcagattatagattgaatgaggcagatggcaactggtattgggggcccaggagcctgtgtatcccttctgtaatcaattacagtggttgcagacatcatgagtactcctttggcacagagctcggtcttttacttcctgcccctaattgacccctgacctggacatatctgtctttaggcctggagtggtgtgtctaagggactggctgagagtctgcagccagactacagtgaacgactctgcctcgtcagtgagattcccccaaaaggaggggcccttggggaggggcctggggcctccccatgcaaccagcatagcccctactgggcccccccatgttacaccctaaagcctgaaacctgaaccccaatcctctgacagaagaaccccagggtcctgtagccctaagtggtactaactttccttcattcaacccacctgcgtctcatactcacctcaccccactgtggctgatttggaattttgtgcccccatgtaagcaccccttcatttggcattccccacttgagaattacccttttgccccgaacatgtttttcttctccctcagtctggcccttccttttcgcaggattcttcctccctccctctttccctcccttcctctttccatctaccctccgattgttcctgaaccgatgagaaataaagtttctgttgataatcatcaaaaatgtctgtcatgggggtggggagcaggggaagcctgggatgcaatgagggtgggaggggaagaaaaaggagtagtacattcatgctgtggaggcatctaaaaaaataaaaaaaataaaaaaagcattattgactgatgcatgtaacctttttttttttttttttttttttctgtctcttatacacatcttatagctg

SEQ ID NO: 234 - DNA, 323 bp, unidentified
  source 1..323: mol_type = other DNA
cagtgctggccaaaaagatatccacttttggttttttgtgtgtaacttttttctgtagtgtatttttttttttttttttatcatcagaaaaaagttacacacaaaaaaccaaaagtggatatctttttggccagcactgttttttttttttttttttttttggcgatcgcttttttttttttttttgctagaaagagtactgttctggaaactgacttttttttttttttttgcgatcgcctttttttttttttgatacatttcagtgctggccaaaaagatatccacttttggttttttgtgtgtaacttttttctgatgat

SEQ ID NO: 235 - DNA, 326 bp, unidentified
  source 1..326: mol_type = other DNA
cacgtgagaaaaaagttacacacaaaaaaccaaaagtggatatctttttggccagcactgtttctcgatcattattattttttggcgatcgcttttttttttttttttgttgagaatggtgctagtggtagtgaacagttttttttttttttttgcgatcgcctttttttttttttttttttttcagtgctggccaaaaagatatccacttttggttttttgtgtgtaacttttttctcacgtgttttttttttttttttttttgacgaataagaaaaaagttacacacaaaaaaccaaaagtggatatctttttggccagcactg

SEQ ID NO: 236 - DNA, 4765 bp, unidentified
  source 1..4765: mol_type = other DNA
tacactacagaaaaaagttacacacaaaaaaccaaaagtggatatctttttggccagcactgttttttttttttttttttttttggttacatgcatcagtcaataatgctttttttattttttttatttttttagatgcctccacagcatgaatgtactactcctttttcttcccctcccaccctcattgcatcccaggcttcccctgctccccacccccatgacagacatttttgatgattatcaacagaaactttatttctcatcggttcaggaacaatcggagggtagatggaaagaggaagggagggaaagagggagggaggaagaatcctgcgaaaaggaagggccagactgagggagaagaaaaacatgttcggggcaaaagggtaattctcaagtggggaatgccaaatgaaggggtgcttacatgggggcacaaaattccaaatcagccacagtggggtgaggtgagtatgagacgcaggtgggttgaatgaaggaaagttagtaccacttagggctacaggaccctggggttcttctgtcagaggattggggttcaggtttcaggctttagggtgtaacatgggggggcccagtaggggctatgctggttgcatggggaggccccaggcccctccccaagggcccctccttttgggggaatctcactgacgaggcagagtcgttcactgtagtctggctgcagactctcagccagtcccttagacacaccactccaggcctaaagacagatatgtccaggtcaggggtcaattaggggcaggaagtaaaagaccgagctctgtgccaaaggagtactcatgatgtctgcaaccactgtaattgattacagaagggatacacaggctcctgggcccccaataccagttgccatctgcctcattcaatctataatctgcacttctgtgtgtgtctctctctgtatagtccatgccccatttggtcggccacatcctgacagttagtgcagggcctccttccctctcctctctgcccccacccccacactctgtctgtcttgctggcaggcagttggcagttgatagactgcagcatgcttatgacagcgttctcaccgaaaagttcccgtggtattcagtaacaagatcctctaggttcttcagggtgggaattcggggcatcgtcctgacaggggagaaagagggagcaggagcacataggttaaagcttttttatcacccttctcccagttgtcccatatgaaataaagtgattctgtgttctctgtgcctgtggcttccttccatcaccaaaccctcttgggtaatctctcattacttactgtctcatcctttactcctaaagaccctgcaaaaccctcctctgctattgtcagctaccgttcccctcatttttctgggcttctccaaatctcaccgttccagccagaaatacacacagagaaggctgataatcaatcccatggagccaacagagataaccacggcttccaatgcaaacaggaaaggattctctatagaaaaaagaaaagcaaagtggaccttatatttgttgtgcccctactacatgccaggcactggtgccaggcaccgcgctaaagacatactctctgtttaatcctcacaacagctcctgtgaggcaggaacaattacctccatcttacatcttaggaaacagaatccaagagtttagggatgtggccaaggccaaagaggtagtatgtggcacagcctagatccagctggttccaaagccatcttcaccttgcaggctctctaggaatgcttcagggaaatcctatacattctatagcccccttgagtacccctcagcctccttctcaatccactcccctactctaacaacacgctaacccaaccctacacagaaaaaccttgatttctagaggttggggttagacagtgtggagagatggggcaccaagtttaggggctttagtgacagggaagtggagcaaaagacagtggtgttagaaaggctggggtgttgggctcatggattgggtcatgtgggcccattttaccttttgaagtattgctcccccagtggattgggtggctccattcactccaatgctgagcacttccacagagtgggttaaagcggctccgaacacgaaacgtgtagcgtttctgcccatccacactaggcaaggagaacttatgtctataatccactgattgttccttgaggagaaagaggatgagggaaagtgggtgtctatgagagaagggagaattaaaacatactcctgaacacccaccagtgtcatctctgctactgcccagtttctctctcatctcttgactactcaagccacactgctcccttcactgacttgaatctaatgcctcccctctggatccccttaatggcttccttttgtttacttgtctatctggtatcaggaagagtatgggtagggaatccctaatgaaaactcactggtgtcaggaatggtggctcacgcctgtaatcccagcactttgggaggccgaggtgggcagatcacctgaggtcaggagttcaagaccagcctgaccaacatggcaaaaccctgtctttactaaaaatacaaaaattagccaggcatggttgtgcatgctcccagctacttgggaggctgaagcaggagaatcacttgaaccagggagacagaggtcgcagtgagcccaagatcgccccactgcactcaagcctgggcaacagagtgaggctctgtctcaaaaaaaaaaaaaaaagaaagaaagaaagaaaagaaaagaaaaaaagaaaactcactggagaaaataggggggaaaggagttggaggagggagggtagggggtgagcagagaagctgggaggcagagaacaggagcttgatattaggtccttctatctgtctggttgaatcctttagccctactttcttggccttagctgctacattcacgtccctagtcactcacagtccagctgtggtcccagtcagtccggtactgcaccaagtgctccaaacagtggttcaagaatctgttgttccagttcagttctagctgggattcactcagtttgtgaagtgttaggttctctggagcccaggggatcactggagatatgtgtgcatatgtggtcattcccctggcctagacaagtcaggatcctgaaggtagtgcccctaatacctcctcccttcccatcatgatcccctacctcctcttttctgcccatgtacccttatgataaaagaacactactctgtagactccaatgtcccacagtatccctggtctcttgaccctttctttccaaattacccagattctgcagttttagcatctgtgtggcctgtctcctgggttcccgtgggtcctggagctgaacaacaaatgtttggtagaggtggatctcctttttttgcaactgacagccagaagtgatttcttcagagaatagatagtggctgcacttctggactttatcattatccgagttcttgtacctagaggagaaaggttggaaggaagaggaacagtggggccaatctgggtactgcagatatccagagcctagcctcatctcccctcaaccgacttatgacttaccccaggagaaaacagtggggtacctgggagacttgctaccctctctcttggtctctgatccaacccacctcttcttcatcccctccccctcgtcccttctcataccaataatgcagagtgaggttggtaggctggggctcagagctgctgttccaagtgcaattcatgtactcgacattgaacacaaaacactgaacctctgggaggggcagagtggaaacactgagggagtcagtgggcatagtggtcaggaagaaatctagattggggagaaaatgaaggcagggagggaaagagaaatgatggtcagaaggaggaggccaagcacggtggctcatgtctgtaatcctggtgctttgaaaggctgaggcaggaggatcactagaggccaggagtttgagaccagcctaggcaacatagtgagaccctgcctcaaaagaaagaaagaaacaaacaaacaagaaagaaagaaagaagaagtagcgtgaggcagggaaccctcccccttgcccttcccactccacttttcaattctgcccacatgattgtaatggccagtggcaggcaccagatctctgtacggccccttcccacagccacccttctcaccagccccctccagtcccagatttcccaccagctgtggtgtcttcattcccattgggcgtcagaattgtcgtgttcagccccactcccagcaggggcagctgcaggaataagagggatgtgaatggtaatgatggcttcaacatggcgcttgctcttcattccctgggtgtagtctgtctgtgtcaggaacctgggtccctcacccactacccctccccacccacacgtttcctctgtcatagcttccggtggaaagaaccttataaaccagggctttacagagggtgtggcaaatatgtgctgtgtgacacgggctaagtcctctaggagattaggtgctgctgtaaggtggtaaacagaaactaaagctggatatacaatagtgtcacagactcaaaaatcctcagcccacctagatcctgggaaggatctgttcactgcggccgcatgttctttttttttttttttttttttttcagtgctggccaaaaagatatccacttttggttttttgtgtgtaacttttttcttattcgtc

SEQ ID NO: 237 - DNA, 326 bp, unidentified
  source 1..326: mol_type = other DNA
cacgtgagaaaaaagttacacacaaaaaaccaaaagtggatatctttttggccagcactgtttctcgatcattattattttttggcgatcgcttttttttttttttttagcaaattggtaatactcctgcctccacagttttttttttttttttgcgatcgcctttttttttttttttttttttcagtgctggccaaaaagatatccacttttggttttttgtgtgtaacttttttctcacgtgttttttttttttttttttttcagctataagaaaaaagttacacacaaaaaaccaaaagtggatatctttttggccagcactg

SEQ ID NO: 238 - DNA, 323 bp, unidentified
  source 1..323: mol_type = other DNA
cagtgctggccaaaaagatatccacttttggttttttgtgtgtaacttttttctagtatgaatttttttttttttttttatcatcagaaaaaagttacacacaaaaaaccaaaagtggatatctttttggccagcactgttttttttttttttttttttttggcgatcgcttttttttttttttttccttctcctctaaatcattaccttctataattttttttttttttttgcgatcgcctttttttttttttgatacatttcagtgctggccaaaaagatatccacttttggttttttgtgtgtaacttttttctgatgat

SEQ ID NO: 239 - DNA, 4764 bp, unidentified
  source 1..4764: mol_type = other DNA
ttcatactagaaaaaagttacacacaaaaaaccaaaagtggatatctttttggccagcactgttttttttttttttttttttttgaacatgcggccgcgtgaacagatccttcccaggatctaggtgggctgaggatttttgagtctgtgacactattgtatatccagctttagtttctgtttaccaccttacagcagcacctaatctcctagaggacttagcccgtgtcacacagcacatatttgccacaccctctgtaaagccctggtttataaggttctttccaccggaagctatgacagaggaaacgtgtgggtggggaggggtagtgggtgagggacccaggttcctgacacagacagactacacccagggaatgaagagcaagcgccatgttgaagccatcattaccattcacatccctcttattcctgcagctgcccctgctgggagtggggctgaacacgacaattctgacgcccaatgggaatgaagacaccacagctggtgggaaatctgggactggagggggctggtgagaagggtggctgtgggaaggggccgtacagagatctggtgcctgccactggccattacaatcatgtgggcagaattgaaaagtggagtgggaagggcaagggggagggttccctgcctcacgctacttcttctttctttctttcttgtttgtttgtttctttctttcttttgaggcagggtctcactatgttgcctaggctggtctcaaactcctggcctctagtgatcctcctgcctcagcctttcaaagcaccaggattacagacatgagccaccgtgcttggcctcctccttctgaccatcatttctctttccctccctgccttcattttctccccaatctagatttcttcctgaccactatgcccactgactccctcagtgtttccactctgcccctcccagaggttcagtgttttgtgttcaatgtcgagtacatgaattgcacttggaacagcagctctgagccccagcctaccaacctcactctgcattattggtatgagaagggacgagggggaggggatgaagaagaggtgggttggatcagagaccaagagagagggtagcaagtctcccaggtaccccactgttttctcctggggtaagtcataagtcggttgaggggagatgaggctaggctctggatatctgcagtacccagattggccccactgttcctcttccttccaacctttctcctctaggtacaagaactcggataatgataaagtccagaagtgcagccactatctattctctgaagaaatcacttctggctgtcagttgcaaaaaaaggagatccacctctaccaaacatttgttgttcagctccaggacccacgggaacccaggagacaggccacacagatgctaaaactgcagaatctgggtaatttggaaagaaagggtcaagagaccagggatactgtgggacattggagtctacagagtagtgttcttttatcataagggtacatgggcagaaaagaggaggtaggggatcatgatgggaagggaggaggtattaggggcactaccttcaggatcctgacttgtctaggccaggggaatgaccacatatgcacacatatctccagtgatcccctgggctccagagaacctaacacttcacaaactgagtgaatcccagctagaactgaactggaacaacagattcttgaaccactgtttggagcacttggtgcagtaccggactgactgggaccacagctggactgtgagtgactagggacgtgaatgtagcagctaaggccaagaaagtagggctaaaggattcaaccagacagatagaaggacctaatatcaagctcctgttctctgcctcccagcttctctgctcaccccctaccctccctcctccaactcctttcccccctattttctccagtgagttttctttttttcttttcttttctttctttctttcttttttttttttttttgagacagagcctcactctgttgcccaggcttgagtgcagtggggcgatcttgggctcactgcgacctctgtctccctggttcaagtgattctcctgcttcagcctcccaagtagctgggagcatgcacaaccatgcctggctaatttttgtatttttagtaaagacagggttttgccatgttggtcaggctggtcttgaactcctgacctcaggtgatctgcccacctcggcctcccaaagtgctgggattacaggcgtgagccaccattcctgacaccagtgagttttcattagggattccctacccatactcttcctgataccagatagacaagtaaacaaaaggaagccattaaggggatccagaggggaggcattagattcaagtcagtgaagggagcagtgtggcttgagtagtcaagagatgagagagaaactgggcagtagcagagatgacactggtgggtgttcaggagtatgttttaattctcccttctctcatagacacccactttccctcatcctctttctcctcaaggaacaatcagtggattatagacataagttctccttgcctagtgtggatgggcagaaacgctacacgtttcgtgttcggagccgctttaacccactctgtggaagtgctcagcattggagtgaatggagccacccaatccactgggggagcaatacttcaaaaggtaaaatgggcccacatgacccaatccatgagcccaacaccccagcctttctaacaccactgtcttttgctccacttccctgtcactaaagcccctaaacttggtgccccatctctccacactgtctaaccccaacctctagaaatcaaggtttttctgtgtagggttgggttagcgtgttgttagagtaggggagtggattgagaaggaggctgaggggtactcaagggggctatagaatgtataggatttccctgaagcattcctagagagcctgcaaggtgaagatggctttggaaccagctggatctaggctgtgccacatactacctctttggccttggccacatccctaaactcttggattctgtttcctaagatgtaagatggaggtaattgttcctgcctcacaggagctgttgtgaggattaaacagagagtatgtctttagcgcggtgcctggcaccagtgcctggcatgtagtaggggcacaacaaatataaggtccactttgcttttcttttttctatagagaatcctttcctgtttgcattggaagccgtggttatctctgttggctccatgggattgattatcagccttctctgtgtgtatttctggctggaacggtgagatttggagaagcccagaaaaatgaggggaacggtagctgacaatagcagaggagggttttgcagggtctttaggagtaaaggatgagacagtaagtaatgagagattacccaagagggtttggtgatggaaggaagccacaggcacagagaacacagaatcactttatttcatatgggacaactgggagaagggtgataaaaaagctttaacctatgtgctcctgctccctctttctcccctgtcaggacgatgccccgaattcccaccctgaagaacctagaggatcttgttactgaataccacgggaacttttcggtgagaacgctgtcataagcatgctgcagtctatcaactgccaactgcctgccagcaagacagacagagtgtgggggtgggggcagagaggagagggaaggaggccctgcactaactgtcaggatgtggccgaccaaatggggcatggactatacagagagagacacacacagaagtgcagattatagattgaatgaggcagatggcaactggtattgggggcccaggagcctgtgtatcccttctgtaatcaattacagtggttgcagacatcatgagtactcctttggcacagagctcggtcttttacttcctgcccctaattgacccctgacctggacatatctgtctttaggcctggagtggtgtgtctaagggactggctgagagtctgcagccagactacagtgaacgactctgcctcgtcagtgagattcccccaaaaggaggggcccttggggaggggcctggggcctccccatgcaaccagcatagcccctactgggcccccccatgttacaccctaaagcctgaaacctgaaccccaatcctctgacagaagaaccccagggtcctgtagccctaagtggtactaactttccttcattcaacccacctgcgtctcatactcacctcaccccactgtggctgatttggaattttgtgcccccatgtaagcaccccttcatttggcattccccacttgagaattacccttttgccccgaacatgtttttcttctccctcagtctggcccttccttttcgcaggattcttcctccctccctctttccctcccttcctctttccatctaccctccgattgttcctgaaccgatgagaaataaagtttctgttgataatcatcaaaaatgtctgtcatgggggtggggagcaggggaagcctgggatgcaatgagggtgggaggggaagaaaaaggagtagtacattcatgctgtggaggcatctaaaaaaataaaaaaaataaaaaaagcattattgactgatgcatgtaacctttttttttttttttttttttttcagtgctggccaaaaagatatccacttttggttttttgtgtgtaacttttttcttatagctg

SEQ ID NO: 240 - DNA, 323 bp, unidentified
  source 1..323: mol_type = other DNA
agaaaaaagttacacacaaaaaaccaaaagtggatatctttttggccagcactggtagtgtatttttttttttttttttatcatccagtgctggccaaaaagatatccacttttggttttttgtgtgtaacttttttctttttttttttttttttttttttggcgatcgcttttttttttttttttgctagaaagagtactgttctggaaactgacttttttttttttttttgcgatcgcctttttttttttttgatacatttagaaaaaagttacacacaaaaaaccaaaagtggatatctttttggccagcactggatgat

SEQ ID NO: 241 - DNA, 326 bp, unidentified
  source 1..326: mol_type = other DNA
cacgtgcagtgctggccaaaaagatatccacttttggttttttgtgtgtaacttttttcttttctcgatcattattattttttggcgatcgcttttttttttttttttgttgagaatggtgctagtggtagtgaacagttttttttttttttttgcgatcgcctttttttttttttttttttttagaaaaaagttacacacaaaaaaccaaaagtggatatctttttggccagcactgcacgtgttttttttttttttttttttgacgaatacagtgctggccaaaaagatatccacttttggttttttgtgtgtaacttttttct

SEQ ID NO: 242 - DNA, 4765 bp, unidentified
  source 1..4765: mol_type = other DNA
tacactaccagtgctggccaaaaagatatccacttttggttttttgtgtgtaacttttttctttttttttttttttttttttttggttacatgcatcagtcaataatgctttttttattttttttatttttttagatgcctccacagcatgaatgtactactcctttttcttcccctcccaccctcattgcatcccaggcttcccctgctccccacccccatgacagacatttttgatgattatcaacagaaactttatttctcatcggttcaggaacaatcggagggtagatggaaagaggaagggagggaaagagggagggaggaagaatcctgcgaaaaggaagggccagactgagggagaagaaaaacatgttcggggcaaaagggtaattctcaagtggggaatgccaaatgaaggggtgcttacatgggggcacaaaattccaaatcagccacagtggggtgaggtgagtatgagacgcaggtgggttgaatgaaggaaagttagtaccacttagggctacaggaccctggggttcttctgtcagaggattggggttcaggtttcaggctttagggtgtaacatgggggggcccagtaggggctatgctggttgcatggggaggccccaggcccctccccaagggcccctccttttgggggaatctcactgacgaggcagagtcgttcactgtagtctggctgcagactctcagccagtcccttagacacaccactccaggcctaaagacagatatgtccaggtcaggggtcaattaggggcaggaagtaaaagaccgagctctgtgccaaaggagtactcatgatgtctgcaaccactgtaattgattacagaagggatacacaggctcctgggcccccaataccagttgccatctgcctcattcaatctataatctgcacttctgtgtgtgtctctctctgtatagtccatgccccatttggtcggccacatcctgacagttagtgcagggcctccttccctctcctctctgcccccacccccacactctgtctgtcttgctggcaggcagttggcagttgatagactgcagcatgcttatgacagcgttctcaccgaaaagttcccgtggtattcagtaacaagatcctctaggttcttcagggtgggaattcggggcatcgtcctgacaggggagaaagagggagcaggagcacataggttaaagcttttttatcacccttctcccagttgtcccatatgaaataaagtgattctgtgttctctgtgcctgtggcttccttccatcaccaaaccctcttgggtaatctctcattacttactgtctcatcctttactcctaaagaccctgcaaaaccctcctctgctattgtcagctaccgttcccctcatttttctgggcttctccaaatctcaccgttccagccagaaatacacacagagaaggctgataatcaatcccatggagccaacagagataaccacggcttccaatgcaaacaggaaaggattctctatagaaaaaagaaaagcaaagtggaccttatatttgttgtgcccctactacatgccaggcactggtgccaggcaccgcgctaaagacatactctctgtttaatcctcacaacagctcctgtgaggcaggaacaattacctccatcttacatcttaggaaacagaatccaagagtttagggatgtggccaaggccaaagaggtagtatgtggcacagcctagatccagctggttccaaagccatcttcaccttgcaggctctctaggaatgcttcagggaaatcctatacattctatagcccccttgagtacccctcagcctccttctcaatccactcccctactctaacaacacgctaacccaaccctacacagaaaaaccttgatttctagaggttggggttagacagtgtggagagatggggcaccaagtttaggggctttagtgacagggaagtggagcaaaagacagtggtgttagaaaggctggggtgttgggctcatggattgggtcatgtgggcccattttaccttttgaagtattgctcccccagtggattgggtggctccattcactccaatgctgagcacttccacagagtgggttaaagcggctccgaacacgaaacgtgtagcgtttctgcccatccacactaggcaaggagaacttatgtctataatccactgattgttccttgaggagaaagaggatgagggaaagtgggtgtctatgagagaagggagaattaaaacatactcctgaacacccaccagtgtcatctctgctactgcccagtttctctctcatctcttgactactcaagccacactgctcccttcactgacttgaatctaatgcctcccctctggatccccttaatggcttccttttgtttacttgtctatctggtatcaggaagagtatgggtagggaatccctaatgaaaactcactggtgtcaggaatggtggctcacgcctgtaatcccagcactttgggaggccgaggtgggcagatcacctgaggtcaggagttcaagaccagcctgaccaacatggcaaaaccctgtctttactaaaaatacaaaaattagccaggcatggttgtgcatgctcccagctacttgggaggctgaagcaggagaatcacttgaaccagggagacagaggtcgcagtgagcccaagatcgccccactgcactcaagcctgggcaacagagtgaggctctgtctcaaaaaaaaaaaaaaaagaaagaaagaaagaaaagaaaagaaaaaaagaaaactcactggagaaaataggggggaaaggagttggaggagggagggtagggggtgagcagagaagctgggaggcagagaacaggagcttgatattaggtccttctatctgtctggttgaatcctttagccctactttcttggccttagctgctacattcacgtccctagtcactcacagtccagctgtggtcccagtcagtccggtactgcaccaagtgctccaaacagtggttcaagaatctgttgttccagttcagttctagctgggattcactcagtttgtgaagtgttaggttctctggagcccaggggatcactggagatatgtgtgcatatgtggtcattcccctggcctagacaagtcaggatcctgaaggtagtgcccctaatacctcctcccttcccatcatgatcccctacctcctcttttctgcccatgtacccttatgataaaagaacactactctgtagactccaatgtcccacagtatccctggtctcttgaccctttctttccaaattacccagattctgcagttttagcatctgtgtggcctgtctcctgggttcccgtgggtcctggagctgaacaacaaatgtttggtagaggtggatctcctttttttgcaactgacagccagaagtgatttcttcagagaatagatagtggctgcacttctggactttatcattatccgagttcttgtacctagaggagaaaggttggaaggaagaggaacagtggggccaatctgggtactgcagatatccagagcctagcctcatctcccctcaaccgacttatgacttaccccaggagaaaacagtggggtacctgggagacttgctaccctctctcttggtctctgatccaacccacctcttcttcatcccctccccctcgtcccttctcataccaataatgcagagtgaggttggtaggctggggctcagagctgctgttccaagtgcaattcatgtactcgacattgaacacaaaacactgaacctctgggaggggcagagtggaaacactgagggagtcagtgggcatagtggtcaggaagaaatctagattggggagaaaatgaaggcagggagggaaagagaaatgatggtcagaaggaggaggccaagcacggtggctcatgtctgtaatcctggtgctttgaaaggctgaggcaggaggatcactagaggccaggagtttgagaccagcctaggcaacatagtgagaccctgcctcaaaagaaagaaagaaacaaacaaacaagaaagaaagaaagaagaagtagcgtgaggcagggaaccctcccccttgcccttcccactccacttttcaattctgcccacatgattgtaatggccagtggcaggcaccagatctctgtacggccccttcccacagccacccttctcaccagccccctccagtcccagatttcccaccagctgtggtgtcttcattcccattgggcgtcagaattgtcgtgttcagccccactcccagcaggggcagctgcaggaataagagggatgtgaatggtaatgatggcttcaacatggcgcttgctcttcattccctgggtgtagtctgtctgtgtcaggaacctgggtccctcacccactacccctccccacccacacgtttcctctgtcatagcttccggtggaaagaaccttataaaccagggctttacagagggtgtggcaaatatgtgctgtgtgacacgggctaagtcctctaggagattaggtgctgctgtaaggtggtaaacagaaactaaagctggatatacaatagtgtcacagactcaaaaatcctcagcccacctagatcctgggaaggatctgttcactgcggccgcatgttctttttttttttttttttttttttagaaaaaagttacacacaaaaaaccaaaagtggatatctttttggccagcactgtattcgtc

SEQ ID NO: 243 - DNA, 326 bp, unidentified
  source 1..326: mol_type = other DNA
cacgtgcagtgctggccaaaaagatatccacttttggttttttgtgtgtaacttttttcttttctcgatcattattattttttggcgatcgcttttttttttttttttagcaaattggtaatactcctgcctccacagttttttttttttttttgcgatcgcctttttttttttttttttttttagaaaaaagttacacacaaaaaaccaaaagtggatatctttttggccagcactgcacgtgttttttttttttttttttttcagctatacagtgctggccaaaaagatatccacttttggttttttgtgtgtaacttttttct

SEQ ID NO: 244 - DNA, 323 bp, unidentified
  source 1..323: mol_type = other DNA
agaaaaaagttacacacaaaaaaccaaaagtggatatctttttggccagcactgagtatgaatttttttttttttttttatcatccagtgctggccaaaaagatatccacttttggttttttgtgtgtaacttttttctttttttttttttttttttttttggcgatcgcttttttttttttttttccttctcctctaaatcattaccttctataattttttttttttttttgcgatcgcctttttttttttttgatacatttagaaaaaagttacacacaaaaaaccaaaagtggatatctttttggccagcactggatgat

SEQ ID NO: 245 - DNA, 4764 bp, unidentified
  source 1..4764: mol_type = other DNA
ttcatactcagtgctggccaaaaagatatccacttttggttttttgtgtgtaacttttttctttttttttttttttttttttttgaacatgcggccgcgtgaacagatccttcccaggatctaggtgggctgaggatttttgagtctgtgacactattgtatatccagctttagtttctgtttaccaccttacagcagcacctaatctcctagaggacttagcccgtgtcacacagcacatatttgccacaccctctgtaaagccctggtttataaggttctttccaccggaagctatgacagaggaaacgtgtgggtggggaggggtagtgggtgagggacccaggttcctgacacagacagactacacccagggaatgaagagcaagcgccatgttgaagccatcattaccattcacatccctcttattcctgcagctgcccctgctgggagtggggctgaacacgacaattctgacgcccaatgggaatgaagacaccacagctggtgggaaatctgggactggagggggctggtgagaagggtggctgtgggaaggggccgtacagagatctggtgcctgccactggccattacaatcatgtgggcagaattgaaaagtggagtgggaagggcaagggggagggttccctgcctcacgctacttcttctttctttctttcttgtttgtttgtttctttctttcttttgaggcagggtctcactatgttgcctaggctggtctcaaactcctggcctctagtgatcctcctgcctcagcctttcaaagcaccaggattacagacatgagccaccgtgcttggcctcctccttctgaccatcatttctctttccctccctgccttcattttctccccaatctagatttcttcctgaccactatgcccactgactccctcagtgtttccactctgcccctcccagaggttcagtgttttgtgttcaatgtcgagtacatgaattgcacttggaacagcagctctgagccccagcctaccaacctcactctgcattattggtatgagaagggacgagggggaggggatgaagaagaggtgggttggatcagagaccaagagagagggtagcaagtctcccaggtaccccactgttttctcctggggtaagtcataagtcggttgaggggagatgaggctaggctctggatatctgcagtacccagattggccccactgttcctcttccttccaacctttctcctctaggtacaagaactcggataatgataaagtccagaagtgcagccactatctattctctgaagaaatcacttctggctgtcagttgcaaaaaaaggagatccacctctaccaaacatttgttgttcagctccaggacccacgggaacccaggagacaggccacacagatgctaaaactgcagaatctgggtaatttggaaagaaagggtcaagagaccagggatactgtgggacattggagtctacagagtagtgttcttttatcataagggtacatgggcagaaaagaggaggtaggggatcatgatgggaagggaggaggtattaggggcactaccttcaggatcctgacttgtctaggccaggggaatgaccacatatgcacacatatctccagtgatcccctgggctccagagaacctaacacttcacaaactgagtgaatcccagctagaactgaactggaacaacagattcttgaaccactgtttggagcacttggtgcagtaccggactgactgggaccacagctggactgtgagtgactagggacgtgaatgtagcagctaaggccaagaaagtagggctaaaggattcaaccagacagatagaaggacctaatatcaagctcctgttctctgcctcccagcttctctgctcaccccctaccctccctcctccaactcctttcccccctattttctccagtgagttttctttttttcttttcttttctttctttctttcttttttttttttttttgagacagagcctcactctgttgcccaggcttgagtgcagtggggcgatcttgggctcactgcgacctctgtctccctggttcaagtgattctcctgcttcagcctcccaagtagctgggagcatgcacaaccatgcctggctaatttttgtatttttagtaaagacagggttttgccatgttggtcaggctggtcttgaactcctgacctcaggtgatctgcccacctcggcctcccaaagtgctgggattacaggcgtgagccaccattcctgacaccagtgagttttcattagggattccctacccatactcttcctgataccagatagacaagtaaacaaaaggaagccattaaggggatccagaggggaggcattagattcaagtcagtgaagggagcagtgtggcttgagtagtcaagagatgagagagaaactgggcagtagcagagatgacactggtgggtgttcaggagtatgttttaattctcccttctctcatagacacccactttccctcatcctctttctcctcaaggaacaatcagtggattatagacataagttctccttgcctagtgtggatgggcagaaacgctacacgtttcgtgttcggagccgctttaacccactctgtggaagtgctcagcattggagtgaatggagccacccaatccactgggggagcaatacttcaaaaggtaaaatgggcccacatgacccaatccatgagcccaacaccccagcctttctaacaccactgtcttttgctccacttccctgtcactaaagcccctaaacttggtgccccatctctccacactgtctaaccccaacctctagaaatcaaggtttttctgtgtagggttgggttagcgtgttgttagagtaggggagtggattgagaaggaggctgaggggtactcaagggggctatagaatgtataggatttccctgaagcattcctagagagcctgcaaggtgaagatggctttggaaccagctggatctaggctgtgccacatactacctctttggccttggccacatccctaaactcttggattctgtttcctaagatgtaagatggaggtaattgttcctgcctcacaggagctgttgtgaggattaaacagagagtatgtctttagcgcggtgcctggcaccagtgcctggcatgtagtaggggcacaacaaatataaggtccactttgcttttcttttttctatagagaatcctttcctgtttgcattggaagccgtggttatctctgttggctccatgggattgattatcagccttctctgtgtgtatttctggctggaacggtgagatttggagaagcccagaaaaatgaggggaacggtagctgacaatagcagaggagggttttgcagggtctttaggagtaaaggatgagacagtaagtaatgagagattacccaagagggtttggtgatggaaggaagccacaggcacagagaacacagaatcactttatttcatatgggacaactgggagaagggtgataaaaaagctttaacctatgtgctcctgctccctctttctcccctgtcaggacgatgccccgaattcccaccctgaagaacctagaggatcttgttactgaataccacgggaacttttcggtgagaacgctgtcataagcatgctgcagtctatcaactgccaactgcctgccagcaagacagacagagtgtgggggtgggggcagagaggagagggaaggaggccctgcactaactgtcaggatgtggccgaccaaatggggcatggactatacagagagagacacacacagaagtgcagattatagattgaatgaggcagatggcaactggtattgggggcccaggagcctgtgtatcccttctgtaatcaattacagtggttgcagacatcatgagtactcctttggcacagagctcggtcttttacttcctgcccctaattgacccctgacctggacatatctgtctttaggcctggagtggtgtgtctaagggactggctgagagtctgcagccagactacagtgaacgactctgcctcgtcagtgagattcccccaaaaggaggggcccttggggaggggcctggggcctccccatgcaaccagcatagcccctactgggcccccccatgttacaccctaaagcctgaaacctgaaccccaatcctctgacagaagaaccccagggtcctgtagccctaagtggtactaactttccttcattcaacccacctgcgtctcatactcacctcaccccactgtggctgatttggaattttgtgcccccatgtaagcaccccttcatttggcattccccacttgagaattacccttttgccccgaacatgtttttcttctccctcagtctggcccttccttttcgcaggattcttcctccctccctctttccctcccttcctctttccatctaccctccgattgttcctgaaccgatgagaaataaagtttctgttgataatcatcaaaaatgtctgtcatgggggtggggagcaggggaagcctgggatgcaatgagggtgggaggggaagaaaaaggagtagtacattcatgctgtggaggcatctaaaaaaataaaaaaaataaaaaaagcattattgactgatgcatgtaacctttttttttttttttttttttttagaaaaaagttacacacaaaaaaccaaaagtggatatctttttggccagcactgtatagctg

SEQ ID NO: 246 - DNA, 317 bp, unidentified
  source 1..317: mol_type = other DNA
cagtgctggccaaaaagatatccacttttggttttttgtgtgtaacttttttctgtagtgtatttttttttttttttttatcatcagaaaaaagttacacacaaaaaaccaaaagtggatatctttttggccagcactgttttttttttttttttttttttgcgaccttttttttttttttttgctagaaagagtactgttctggaaactgacttttttttttttttttggtcgctttttttttttttgatacatttcagtgctggccaaaaagatatccacttttggttttttgtgtgtaacttttttctgatgat

SEQ ID NO: 247 - DNA, 319 bp, unidentified
  source 1..319: mol_type = other DNA
cacgtgagaaaaaagttacacacaaaaaaccaaaagtggatatctttttggccagcactgtttctcgatcattattattttttgcgaccttttttttttttttttgttgagaatggtgctagtggtagtgaacagtttttttttttttttggtcgctttttttttttttttttttttcagtgctggccaaaaagatatccacttttggttttttgtgtgtaacttttttctcacgtgttttttttttttttttttttgacgaataagaaaaaagttacacacaaaaaaccaaaagtggatatctttttggccagcactg

SEQ ID NO: 248 - DNA, 4765 bp, unidentified; identical to SEQ ID NO: 236
  source 1..4765: mol_type = other DNA

SEQ ID NO: 249 - DNA, 320 bp, unidentified
  source 1..320: mol_type = other DNA
cacgtgagaaaaaagttacacacaaaaaaccaaaagtggatatctttttggccagcactgtttctcgatcattattattttttgcgaccttttttttttttttttagcaaattggtaatactcctgcctccacagttttttttttttttttggtcgctttttttttttttttttttttcagtgctggccaaaaagatatccacttttggttttttgtgtgtaacttttttctcacgtgttttttttttttttttttttcagctataagaaaaaagttacacacaaaaaaccaaaagtggatatctttttggccagcactg

SEQ ID NO: 250 - DNA, 317 bp, unidentified
  source 1..317: mol_type = other DNA
cagtgctggccaaaaagatatccacttttggttttttgtgtgtaacttttttctagtatgaatttttttttttttttttatcatcagaaaaaagttacacacaaaaaaccaaaagtggatatctttttggccagcactgttttttttttttttttttttttgcgaccttttttttttttttttccttctcctctaaatcattaccttctataattttttttttttttttggtcgctttttttttttttgatacatttcagtgctggccaaaaagatatccacttttggttttttgtgtgtaacttttttctgatgat

SEQ ID NO: 251 - DNA, 4764 bp, unidentified; identical to SEQ ID NO: 239
  source 1..4764: mol_type = other DNA

SEQ ID NO: 252 - DNA, 317 bp, unidentified
  source 1..317: mol_type = other DNA
agaaaaaagttacacacaaaaaaccaaaagtggatatctttttggccagcactggtagtgtatttttttttttttttttatcatccagtgctggccaaaaagatatccacttttggttttttgtgtgtaacttttttctttttttttttttttttttttttgcgaccttttttttttttttttgctagaaagagtactgttctggaaactgacttttttttttttttttggtcgctttttttttttttgatacatttagaaaaaagttacacacaaaaaaccaaaagtggatatctttttggccagcactggatgat

SEQ ID NO: 253 - DNA, 320 bp, unidentified
  source 1..320: mol_type = other DNA
cacgtgcagtgctggccaaaaagatatccacttttggttttttgtgtgtaacttttttcttttctcgatcattattattttttgcgaccttttttttttttttttgttgagaatggtgctagtggtagtgaacagttttttttttttttttggtcgctttttttttttttttttttttagaaaaaagttacacacaaaaaaccaaaagtggatatctttttggccagcactgcacgtgttttttttttttttttttttgacgaatacagtgctggccaaaaagatatccacttttggttttttgtgtgtaacttttttct

SEQ ID NO: 254 - DNA, 4765 bp, unidentified; identical to SEQ ID NO: 242
  source 1..4765: mol_type = other DNA

SEQ ID NO: 255 - DNA, 320 bp, unidentified
  source 1..320: mol_type = other DNA
cacgtgcagtgctggccaaaaagatatccacttttggttttttgtgtgtaacttttttcttttctcgatcattattattttttgcgaccttttttttttttttttagcaaattggtaatactcctgcctccacagttttttttttttttttggtcgctttttttttttttttttttttagaaaaaagttacacacaaaaaaccaaaagtggatatctttttggccagcactgcacgtgttttttttttttttttttttcagctatacagtgctggccaaaaagatatccacttttggttttttgtgtgtaacttttttct

SEQ ID NO: 256 - DNA, 317 bp, unidentified
  source 1..317: mol_type = other DNA
agaaaaaagttacacacaaaaaaccaaaagtggatatctttttggccagcactgagtatgaatttttttttttttttttatcatccagtgctggccaaaaagatatccacttttggttttttgtgtgtaacttttttctttttttttttttttttttttttgcgaccttttttttttttttttccttctcctctaaatcattaccttctataattttttttttttttttggtcgctttttttttttttgatacatttagaaaaaagttacacacaaaaaaccaaaagtggatatctttttggccagcactggatgat

SEQ ID NO: 257 - DNA, 4764 bp, unidentified; identical to SEQ ID NO: 245
  source 1..4764: mol_type = other DNA

SEQ ID NO: 258 - DNA, 329 bp, unidentified
  source 1..329: mol_type = other DNA
cagtgctggccaaaaagatatccacttttggttttttgtgtgtaacttttttctgtagtgtatttttttttttttttttatcatcagaaaaaagttacacacaaaaaaccaaaagtggatatctttttggccagcactgttttttttttttttttttttttgcggcgatcggcttttttttttttttttgctagaaagagtactgttctggaaactgacttttttttttttttttgccgatcgccgctttttttttttttgatacatttcagtgctggccaaaaagatatccacttttggttttttgtgtgtaacttttttctgatgat

SEQ ID NO: 259 - DNA, 332 bp, unidentified
  source 1..332: mol_type = other DNA
cacgtgagaaaaaagttacacacaaaaaaccaaaagtggatatctttttggccagcactgtttctcgatcattattattttttgcggcgatcggcttttttttttttttttgttgagaatggtgctagtggtagtgaacagttttttttttttttttgccgatcgccgctttttttttttttttttttttcagtgctggccaaaaagatatccacttttggttttttgtgtgtaacttttttctcacgtgttttttttttttttttttttgacgaataagaaaaaagttacacacaaaaaaccaaaagtggatatctttttggccagcactg

SEQ ID NO: 260 - DNA, 4765 bp, unidentified; identical to SEQ ID NO: 236
  source 1..4765: mol_type = other DNA

SEQ ID NO: 261 - DNA, 332 bp, unidentified
  source 1..332: mol_type = other DNA
cacgtgagaaaaaagttacacacaaaaaaccaaaagtggatatctttttggccagcactgtttctcgatcattattattttttgcggcgatcggcttttttttttttttttagcaaattggtaatactcctgcctccacagttttttttttttttttgccgatcgccgctttttttttttttttttttttcagtgctggccaaaaagatatccacttttggttttttgtgtgtaacttttttctcacgtgttttttttttttttttttttcagctataagaaaaaagttacacacaaaaaaccaaaagtggatatctttttggccagcactg

SEQ ID NO: 262 - DNA, 329 bp, unidentified
  source 1..329: mol_type = other DNA
cagtgctggccaaaaagatatccacttttggttttttgtgtgtaacttttttctagtatgaatttttttttttttttttatcatcagaaaaaagttacacacaaaaaaccaaaagtggatatctttttggccagcactgttttttttttttttttttttttgcggcgatcggcttttttttttttttttccttctcctctaaatcattaccttctataattttttttttttttttgccgatcgccgctttttttttttttgatacatttcagtgctggccaaaaagatatccacttttggttttttgtgtgtaacttttttctgatgat

SEQ ID NO: 263 - DNA, 4764 bp, unidentified; identical to SEQ ID NO: 239
  source 1..4764: mol_type = other DNA

SEQ ID NO: 264 - DNA, 329 bp, unidentified
  source 1..329: mol_type = other DNA
agaaaaaagttacacacaaaaaaccaaaagtggatatctttttggccagcactggtagtgtatttttttttttttttttatcatccagtgctggccaaaaagatatccacttttggttttttgtgtgtaacttttttctttttttttttttttttttttttgcggcgatcggcttttttttttttttttgctagaaagagtactgttctggaaactgacttttttttttttttttgccgatcgccgctttttttttttttgatacatttagaaaaaagttacacacaaaaaaccaaaagtggatatctttttggccagcactggatgat

SEQ ID NO: 265 - DNA, 332 bp, unidentified
  source 1..332: mol_type = other DNA
cacgtgcagtgctggccaaaaagatatccacttttggttttttgtgtgtaacttttttcttttctcgatcattattattttttgcggcgatcggcttttttttttttttttgttgagaatggtgctagtggtagtgaacagttttttttttttttttgccgatcgccgctttttttttttttttttttttagaaaaaagttacacacaaaaaaccaaaagtggatatctttttggccagcactgcacgtgttttttttttttttttttttgacgaatacagtgctggccaaaaagatatccacttttggttttttgtgtgtaacttttttct

SEQ ID NO: 266 - DNA, 4765 bp, unidentified; identical to SEQ ID NO: 242
  source 1..4765: mol_type = other DNA

SEQ ID NO: 267 - DNA, 332 bp, unidentified
  source 1..332: mol_type = other DNA
cacgtgcagtgctggccaaaaagatatccacttttggttttttgtgtgtaacttttttcttttctcgatcattattattttttgcggcgatcggcttttttttttttttttagcaaattggtaatactcctgcctccacagttttttttttttttttgccgatcgccgctttttttttttttttttttttagaaaaaagttacacacaaaaaaccaaaagtggatatctttttggccagcactgcacgtgttttttttttttttttttttcagctatacagtgctggccaaaaagatatccacttttggttttttgtgtgtaacttttttct

SEQ ID NO: 268 - DNA, 329 bp, unidentified
  source 1..329: mol_type = other DNA
agaaaaaagttacacacaaaaaaccaaaagtggatatctttttggccagcactgagtatgaatttttttttttttttttatcatccagtgctggccaaaaagatatccacttttggttttttgtgtgtaacttttttctttttttttttttttttttttttgcggcgatcggcttttttttttttttttccttctcctctaaatcattaccttctataattttttttttttttttgccgatcgccgctttttttttttttgatacatttagaaaaaagttacacacaaaaaaccaaaagtggatatctttttggccagcactggatgat

SEQ ID NO: 269 - DNA, 4764 bp, unidentified; identical to SEQ ID NO: 245
  source 1..4764: mol_type = other DNA

SEQ ID NO: 270 - DNA, 323 bp, unidentified
  source 1..323: mol_type = other DNA
gtcacgaccggtttttctataggtgaaaaccaaaaaacacacattgaaaaaagagtagtgtatttttttttttttttttatcatctcttttttcaatgtgtgttttttggttttcacctatagaaaaaccggtcgtgacttttttttttttttttttttttggcgatcgcttttttttttttttttgctagaaagagtactgttctggaaactgacttttttttttttttttgcgatcgcctttttttttttttgatacatttgtcacgaccggtttttctataggtgaaaaccaaaaaacacacattgaaaaaagagatgat

SEQ ID NO: 271 - DNA, 326 bp, unidentified
  source 1..326: mol_type = other DNA
cacgtgtcttttttcaatgtgtgttttttggttttcacctatagaaaaaccggtcgtgactttctcgatcattattattttttggcgatcgcttttttttttttttttgttgagaatggtgctagtggtagtgaacagttttttttttttttttgcgatcgcctttttttttttttttttttttgtcacgaccggtttttctataggtgaaaaccaaaaaacacacattgaaaaaagacacgtgttttttttttttttttttttgacgaatatcttttttcaatgtgtgttttttggttttcacctatagaaaaaccggtcgtgac

SEQ ID NO: 272 - DNA, 4765 bp, unidentified
  source 1..4765: mol_type = other DNA
tacactactcttttttcaatgtgtgttttttggttttcacctatagaaaaaccggtcgtgacttttttttttttttttttttttggttacatgcatcagtcaataatgctttttttattttttttatttttttagatgcctccacagcatgaatgtactactcctttttcttcccctcccaccctcattgcatcccaggcttcccctgctccccacccccatgacagacatttttgatgattatcaacagaaactttatttctcatcggttcaggaacaatcggagggtagatggaaagaggaagggagggaaagagggagggaggaagaatcctgcgaaaaggaagggccagactgagggagaagaaaaacatgttcggggcaaaagggtaattctcaagtggggaatgccaaatgaaggggtgcttacatgggggcacaaaattccaaatcagccacagtggggtgaggtgagtatgagacgcaggtgggttgaatgaaggaaagttagtaccacttagggctacaggaccctggggttcttctgtcagaggattggggttcaggtttcaggctttagggtgtaacatgggggggcccagtaggggctatgctggttgcatggggaggccccaggcccctccccaagggcccctccttttgggggaatctcactgacgaggcagagtcgttcactgtagtctggctgcagactctcagccagtcccttagacacaccactccaggcctaaagacagatatgtccaggtcaggggtcaattaggggcaggaagtaaaagaccgagctctgtgccaaaggagtactcatgatgtctgcaaccactgtaattgattacagaagggatacacaggctcctgggcccccaataccagttgccatctgcctcattcaatctataatctgcacttctgtgtgtgtctctctctgtatagtccatgccccatttggtcggccacatcctgacagttagtgcagggcctccttccctctcctctctgcccccacccccacactctgtctgtcttgctggcaggcagttggcagttgatagactgcagcatgcttatgacagcgttctcaccgaaaagttcccgtggtattcagtaacaagatcctctaggttcttcagggtgggaattcggggcatcgtcctgacaggggagaaagagggagcaggagcacataggttaaagcttttttatcacccttctcccagttgtcccatatgaaataaagtgattctgtgttctctgtgcctgtggcttccttccatcaccaaaccctcttgggtaatctctcattacttactgtctcatcctttactcctaaagaccctgcaaaaccctcctctgctattgtcagctaccgttcccctcatttttctgggcttctccaaatctcaccgttccagccagaaatacacacagagaaggctgataatcaatcccatggagccaacagagataaccacggcttccaatgcaaacaggaaaggattctctatagaaaaaagaaaagcaaagtggaccttatatttgttgtgcccctactacatgccaggcactggtgccaggcaccgcgctaaagacatactctctgtttaatcctcacaacagctcctgtgaggcaggaacaattacctccatcttacatcttaggaaacagaatccaagagtttagggatgtggccaaggccaaagaggtagtatgtggcacagcctagatccagctggttccaaagccatcttcaccttgcaggctctctaggaatgcttcagggaaatcctatacattctatagcccccttgagtacccctcagcctccttctcaatccactcccctactctaacaacacgctaacccaaccctacacagaaaaaccttgatttctagaggttggggttagacagtgtggagagatggggcaccaagtttaggggctttagtgacagggaagtggagcaaaagacagtggtgttagaaaggctggggtgttgggctcatggattgggtcatgtgggcccattttaccttttgaagtattgctcccccagtggattgggtggctccattcactccaatgctgagcacttccacagagtgggttaaagcggctccgaacacgaaacgtgtagcgtttctgcccatccacactaggcaaggagaacttatgtctataatccactgattgttccttgaggagaaagaggatgagggaaagtgggtgtctatgagagaagggagaattaaaacatactcctgaacacccaccagtgtcatctctgctactgcccagtttctctctcatctcttgactactcaagccacactgctcccttcactgacttgaatctaatgcctcccctctggatccccttaatggcttccttttgtttacttgtctatctggtatcaggaagagtatgggtagggaatccctaatgaaaactcactggtgtcaggaatggtggctcacgcctgtaatcccagcactttgggaggccgaggtgggcagatcacctgaggtcaggagttcaagaccagcctgaccaacatggcaaaaccctgtctttactaaaaatacaaaaattagccaggcatggttgtgcatgctcccagctacttgggaggctgaagcaggagaatcacttgaaccagggagacagaggtcgcagtgagcccaagatcgccccactgcactcaagcctgggcaacagagtgaggctctgtctcaaaaaaaaaaaaaaaagaaagaaagaaagaaaagaaaagaaaaaaagaaaactcactggagaaaataggggggaaaggagttggaggagggagggtagggggtgagcagagaagctgggaggcagagaacaggagcttgatattaggtccttctatctgtctggttgaatcctttagccctactttcttggccttagctgctacattcacgtccctagtcactcacagtccagctgtggtcccagtcagtccggtactgcaccaagtgctccaaacagtggttcaagaatctgttgttccagttcagttctagctgggattcactcagtttgtgaagtgttaggttctctggagcccaggggatcactggagatatgtgtgcatatgtggtcattcccctggcctagacaagtcaggatcctgaaggtagtgcccctaatacctcctcccttcccatcatgatcccctacctcctcttttctgcccatgtacccttatgataaaagaacactactctgtagactccaatgtcccacagtatccctggtctcttgaccctttctttccaaattacccagattctgcagttttagcatctgtgtggcctgtctcctgggttcccgtgggtcctggagctgaacaacaaatgtttggtagaggtggatctcctttttttgcaactgacagccagaagtgatttcttcagagaatagatagtggctgcacttctggactttatcattatccgagttcttgtacctagaggagaaaggttggaaggaagaggaacagtggggccaatctgggtactgcagatatccagagcctagcctcatctcccctcaaccgacttatgacttaccccaggagaaaacagtggggtacctgggagacttgctaccctctctcttggtctctgatccaacccacctcttcttcatcccctccccctcgtcccttctcataccaataatgcagagtgaggttggtaggctggggctcagagctgctgttccaagtgcaattcatgtactcgacattgaacacaaaacactgaacctctgggaggggcagagtggaaacactgagggagtcagtgggcatagtggtcaggaagaaatctagattggggagaaaatgaaggcagggagggaaagagaaatgatggtcagaaggaggaggccaagcacggtggctcatgtctgtaatcctggtgctttgaaaggctgaggcaggaggatcactagaggccaggagtttgagaccagcctaggcaacatagtgagaccctgcctcaaaagaaagaaagaaacaaacaaacaagaaagaaagaaagaagaagtagcgtgaggcagggaaccctcccccttgcccttcccactccacttttcaattctgcccacatgattgtaatggccagtggcaggcaccagatctctgtacggccccttcccacagccacccttctcaccagccccctccagtcccagatttcccaccagctgtggtgtcttcattcccattgggcgtcagaattgtcgtgttcagccccactcccagcaggggcagctgcaggaataagagggatgtgaatggtaatgatggcttcaacatggcgcttgctcttcattccctgggtgtagtctgtctgtgtcaggaacctgggtccctcacccactacccctccccacccacacgtttcctctgtcatagcttccggtggaaagaaccttataaaccagggctttacagagggtgtggcaaatatgtgctgtgtgacacgggctaagtcctctaggagattaggtgctgctgtaaggtggtaaacagaaactaaagctggatatacaatagtgtcacagactcaaaaatcctcagcccacctagatcctgggaaggatctgttcactgcggccgcatgttctttttttttttttttttttttttgtcacgaccggtttttctataggtgaaaaccaaaaaacacacattgaaaaaagatattcgtc

SEQ ID NO: 273 - DNA, 326 bp, unidentified
  source 1..326: mol_type = other DNA
cacgtgtcttttttcaatgtgtgttttttggttttcacctatagaaaaaccggtcgtgactttctcgatcattattattttttggcgatcgcttttttttttttttttagcaaattggtaatactcctgcctccacagttttttttttttttttgcgatcgcctttttttttttttttttttttgtcacgaccggtttttctataggtgaaaaccaaaaaacacacattgaaaaaagacacgtgttttttttttttttttttttcagctatatcttttttcaatgtgtgttttttggttttcacctatagaaaaaccggtcgtgac

SEQ ID NO: 274 - DNA, 323 bp, unidentified
  source 1..323: mol_type = other DNA
gtcacgaccggtttttctataggtgaaaaccaaaaaacacacattgaaaaaagaagtatgaatttttttttttttttttatcatctcttttttcaatgtgtgttttttggttttcacctatagaaaaaccggtcgtgacttttttttttttttttttttttggcgatcgcttttttttttttttttccttctcctctaaatcattaccttctataattttttttttttttttgcgatcgcctttttttttttttgatacatttgtcacgaccggtttttctataggtgaaaaccaaaaaacacacattgaaaaaagagatgat

SEQ ID NO: 275 - DNA, 4764 bp, unidentified
  source 1..4764: mol_type = other DNA
ttcatacttcttttttcaatgtgtgttttttggttttcacctatagaaaaaccggtcgtgacttttttttttttttttttttttgaacatgcggccgcgtgaacagatccttcccaggatctaggtgggctgaggatttttgagtctgtgacactattgtatatccagctttagtttctgtttaccaccttacagcagcacctaatctcctagaggacttagcccgtgtcacacagcacatatttgccacaccctctgtaaagccctggtttataaggttctttccaccggaagctatgacagaggaaacgtgtgggtggggaggggtagtgggtgagggacccaggttcctgacacagacagactacacccagggaatgaagagcaagcgccatgttgaagccatcattaccattcacatccctcttattcctgcagctgcccctgctgggagtggggctgaacacgacaattctgacgcccaatgggaatgaagacaccacagctggtgggaaatctgggactggagggggctggtgagaagggtggctgtgggaaggggccgtacagagatctggtgcctgccactggccattacaatcatgtgggcagaattgaaaagtggagtgggaagggcaagggggagggttccctgcctcacgctacttcttctttctttctttcttgtttgtttgtttctttctttcttttgaggcagggtctcactatgttgcctaggctggtctcaaactcctggcctctagtgatcctcctgcctcagcctttcaaagcaccaggattacagacatgagccaccgtgcttggcctcctccttctgaccatcatttctctttccctccctgccttcattttctccccaatctagatttcttcctgaccactatgcccactgactccctcagtgtttccactctgcccctcccagaggttcagtgttttgtgttcaatgtcgagtacatgaattgcacttggaacagcagctctgagccccagcctaccaacctcactctgcattattggtatgagaagggacgagggggaggggatgaagaagaggtgggttggatcagagaccaagagagagggtagcaagtctcccaggtaccccactgttttctcctggggtaagtcataagtcggttgaggggagatgaggctaggctctggatatctgcagtacccagattggccccactgttcctcttccttccaacctttctcctctaggtacaagaactcggataatgataaagtccagaagtgcagccactatctattctctgaagaaatcacttctggctgtcagttgcaaaaaaaggagatccacctctaccaaacatttgttgttcagctccaggacccacgggaacccaggagacaggccacacagatgctaaaactgcagaatctgggtaatttggaaagaaagggtcaagagaccagggatactgtgggacattggagtctacagagtagtgttcttttatcataagggtacatgggcagaaaagaggaggtaggggatcatgatgggaagggaggaggtattaggggcactaccttcaggatcctgacttgtctaggccaggggaatgaccacatatgcacacatatctccagtgatcccctgggctccagagaacctaacacttcacaaactgagtgaatcccagctagaactgaactggaacaacagattcttgaaccactgtttggagcacttggtgcagtaccggactgactgggaccacagctggactgtgagtgactagggacgtgaatgtagcagctaaggccaagaaagtagggctaaaggattcaaccagacagatagaaggacctaatatcaagctcctgttctctgcctcccagcttctctgctcaccccctaccctccctcctccaactcctttcccccctattttctccagtgagttttctttttttcttttcttttctttctttctttcttttttttttttttttgagacagagcctcactctgttgcccaggcttgagtgcagtggggcgatcttgggctcactgcgacctctgtctccctggttcaagtgattctcctgcttcagcctcccaagtagctgggagcatgcacaaccatgcctggctaatttttgtatttttagtaaagacagggttttgccatgttggtcaggctggtcttgaactcctgacctcaggtgatctgcccacctcggcctcccaaagtgctgggattacaggcgtgagccaccattcctgacaccagtgagttttcattagggattccctacccatactcttcctgataccagatagacaagtaaacaaaaggaagccattaaggggatccagaggggaggcattagattcaagtcagtgaagggagcagtgtggcttgagtagtcaagagatgagagagaaactgggcagtagcagagatgacactggtgggtgttcaggagtatgttttaattctcccttctctcatagacacccactttccctcatcctctttctcctcaaggaacaatcagtggattatagacataagttctccttgcctagtgtggatgggcagaaacgctacacgtttcgtgttcggagccgctttaacccactctgtggaagtgctcagcattggagtgaatggagccacccaatccactgggggagcaatacttcaaaaggtaaaatgggcccacatgacccaatccatgagcccaacaccccagcctttctaacaccactgtcttttgctccacttccctgtcactaaagcccctaaacttggtgccccatctctccacactgtctaaccccaacctctagaaatcaaggtttttctgtgtagggttgggttagcgtgttgttagagtaggggagtggattgagaaggaggctgaggggtactcaagggggctatagaatgtataggatttccctgaagcattcctagagagcctgcaaggtgaagatggctttggaaccagctggatctaggctgtgccacatactacctctttggccttggccacatccctaaactcttggattctgtttcctaagatgtaagatggaggtaattgttcctgcctcacaggagctgttgtgaggattaaacagagagtatgtctttagcgcggtgcctggcaccagtgcctggcatgtagtaggggcacaacaaatataaggtccactttgcttttcttttttctatagagaatcctttcctgtttgcattggaagccgtggttatctctgttggctccatgggattgattatcagccttctctgtgtgtatttctggctggaacggtgagatttggagaagcccagaaaaatgaggggaacggtagctgacaatagcagaggagggttttgcagggtctttaggagtaaaggatgagacagtaagtaatgagagattacccaagagggtttggtgatggaaggaagccacaggcacagagaacacagaatcactttatttcatatgggacaactgggagaagggtgataaaaaagctttaacctatgtgctcctgctccctctttctcccctgtcaggacgatgccccgaattcccaccctgaagaacctagaggatcttgttactgaataccacgggaacttttcggtgagaacgctgtcataagcatgctgcagtctatcaactgccaactgcctgccagcaagacagacagagtgtgggggtgggggcagagaggagagggaaggaggccctgcactaactgtcaggatgtggccgaccaaatggggcatggactatacagagagagacacacacagaagtgcagattatagattgaatgaggcagatggcaactggtattgggggcccaggagcctgtgtatcccttctgtaatcaattacagtggttgcagacatcatgagtactcctttggcacagagctcggtcttttacttcctgcccctaattgacccctgacctggacatatctgtctttaggcctggagtggtgtgtctaagggactggctgagagtctgcagccagactacagtgaacgactctgcctcgtcagtgagattcccccaaaaggaggggcccttggggaggggcctggggcctccccatgcaaccagcatagcccctactgggcccccccatgttacaccctaaagcctgaaacctgaaccccaatcctctgacagaagaaccccagggtcctgtagccctaagtggtactaactttccttcattcaacccacctgcgtctcatactcacctcaccccactgtggctgatttggaattttgtgcccccatgtaagcaccccttcatttggcattccccacttgagaattacccttttgccccgaacatgtttttcttctccctcagtctggcccttccttttcgcaggattcttcctccctccctctttccctcccttcctctttccatctaccctccgattgttcctgaaccgatgagaaataaagtttctgttgataatcatcaaaaatgtctgtcatgggggtggggagcaggggaagcctgggatgcaatgagggtgggaggggaagaaaaaggagtagtacattcatgctgtggaggcatctaaaaaaataaaaaaaataaaaaaagcattattgactgatgcatgtaacctttttttttttttttttttttttgtcacgaccggtttttctataggtgaaaaccaaaaaacacacattgaaaaaagatatagctg

SEQ ID NO: 276 - DNA, 323 bp, unidentified
  source 1..323: mol_type = other DNA
tcttttttcaatgtgtgttttttggttttcacctatagaaaaaccggtcgtgacgtagtgtatttttttttttttttttatcatcgtcacgaccggtttttctataggtgaaaaccaaaaaacacacattgaaaaaagattttttttttttttttttttttggcgatcgcttttttttttttttttgctagaaagagtactgttctggaaactgacttttttttttttttttgcgatcgcctttttttttttttgatacattttcttttttcaatgtgtgttttttggttttcacctatagaaaaaccggtcgtgacgatgat

SEQ ID NO: 277 - DNA, 326 bp, unidentified
  source 1..326: mol_type = other DNA
cacgtggtcacgaccggtttttctataggtgaaaaccaaaaaacacacattgaaaaaagatttctcgatcattattattttttggcgatcgcttttttttttttttttgttgagaatggtgctagtggtagtgaacagttttttttttttttttgcgatcgccttttttttttttttttttttttcttttttcaatgtgtgttttttggttttcacctatagaaaaaccggtcgtgaccacgtgttttttttttttttttttttgacgaatagtcacgaccggtttttctataggtgaaaaccaaaaaacacacattgaaaaaaga

SEQ ID NO: 278 - DNA, 4765 bp, unidentified
  source 1..4765: mol_type = other DNA
tacactacgtcacgaccggtttttctataggtgaaaaccaaaaaacacacattgaaaaaagattttttttttttttttttttttggttacatgcatcagtcaataatgctttttttattttttttatttttttagatgcctccacagcatgaatgtactactcctttttcttcccctcccaccctcattgcatcccaggcttcccctgctccccacccccatgacagacatttttgatgattatcaacagaaactttatttctcatcggttcaggaacaatcggagggtagatggaaagaggaagggagggaaagagggagggaggaagaatcctgcgaaaaggaagggccagactgagggagaagaaaaacatgttcggggcaaaagggtaattctcaagtggggaatgccaaatgaaggggtgcttacatgggggcacaaaattccaaatcagccacagtggggtgaggtgagtatgagacgcaggtgggttgaatgaaggaaagttagtaccacttagggctacaggaccctggggttcttctgtcagaggattggggttcaggtttcaggctttagggtgtaacatgggggggcccagtaggggctatgctggttgcatggggaggccccaggcccctccccaagggcccctccttttgggggaatctcactgacgaggcagagtcgttcactgtagtctggctgcagactctcagccagtcccttagacacaccactccaggcctaaagacagatatgtccaggtcaggggtcaattaggggcaggaagtaaaagaccgagctctgtgccaaaggagtactcatgatgtctgcaaccactgtaattgattacagaagggatacacaggctcctgggcccccaataccagttgccatctgcctcattcaatctataatctgcacttctgtgtgtgtctctctctgtatagtccatgccccatttggtcggccacatcctgacagttagtgcagggcctccttccctctcctctctgcccccacccccacactctgtctgtcttgctggcaggcagttggcagttgatagactgcagcatgcttatgacagcgttctcaccgaaaagttcccgtggtattcagtaacaagatcctctaggttcttcagggtgggaattcggggcatcgtcctgacaggggagaaagagggagcaggagcacataggttaaagcttttttatcacccttctcccagttgtcccatatgaaataaagtgattctgtgttctctgtgcctgtggcttccttccatcaccaaaccctcttgggtaatctctcattacttactgtctcatcctttactcctaaagaccctgcaaaaccctcctctgctattgtcagctaccgttcccctcatttttctgggcttctccaaatctcaccgttccagccagaaatacacacagagaaggctgataatcaatcccatggagccaacagagataaccacggcttccaatgcaaacaggaaaggattctctatagaaaaaagaaaagcaaagtggaccttatatttgttgtgcccctactacatgccaggcactggtgccaggcaccgcgctaaagacatactctctgtttaatcctcacaacagctcctgtgaggcaggaacaattacctccatcttacatcttaggaaacagaatccaagagtttagggatgtggccaaggccaaagaggtagtatgtggcacagcctagatccagctggttccaaagccatcttcaccttgcaggctctctaggaatgcttcagggaaatcctatacattctatagcccccttgagtacccctcagcctccttctcaatccactcccctactctaacaacacgctaacccaaccctacacagaaaaaccttgatttctagaggttggggttagacagtgtggagagatggggcaccaagtttaggggctttagtgacagggaagtggagcaaaagacagtggtgttagaaaggctggggtgttgggctcatggattgggtcatgtgggcccattttaccttttgaagtattgctcccccagtggattgggtggctccattcactccaatgctgagcacttccacagagtgggttaaagcggctccgaacacgaaacgtgtagcgtttctgcccatccacactaggcaaggagaacttatgtctataatccactgattgttccttgaggagaaagaggatgagggaaagtgggtgtctatgagagaagggagaattaaaacatactcctgaacacccaccagtgtcatctctgctactgcccagtttctctctcatctcttgactactcaagccacactgctcccttcactgacttgaatctaatgcctcccctctggatccccttaatggcttccttttgtttacttgtctatctggtatcaggaagagtatgggtagggaatccctaatgaaaactcactggtgtcaggaatggtggctcacgcctgtaatcccagcactttgggaggccgaggtgggcagatcacctgaggtcaggagttcaagaccagcctgaccaacatggcaaaaccctgtctttactaaaaatacaaaaattagccaggcatggttgtgcatgctcccagctacttgggaggctgaagcaggagaatcacttgaaccagggagacagaggtcgcagtgagcccaagatcgccccactgcactcaagcctgggcaacagagtgaggctctgtctcaaaaaaaaaaaaaaaagaaagaaagaaagaaaagaaaagaaaaaaagaaaactcactggagaaaataggggggaaaggagttggaggagggagggtagggggtgagcagagaagctgggaggcagagaacaggagcttgatattaggtccttctatctgtctggttgaatcctttagccctactttcttggccttagctgctacattcacgtccctagtcactcacagtccagctgtggtcccagtcagtccggtactgcaccaagtgctccaaacagtggttcaagaatctgttgttccagttcagttctagctgggattcactcagtttgtgaagtgttaggttctctggagcccaggggatcactggagatatgtgtgcatatgtggtcattcccctggcctagacaagtcaggatcctgaaggtagtgcccctaatacctcctcccttcccatcatgatcccctacctcctcttttctgcccatgtacccttatgataaaagaacactactctgtagactccaatgtcccacagtatccctggtctcttgaccctttctttccaaattacccagattctgcagttttagcatctgtgtggcctgtctcctgggttcccgtgggtcctggagctgaacaacaaatgtttggtagaggtggatctcctttttttgcaactgacagccagaagtgatttcttcagagaatagatagtggctgcacttctggactttatcattatccgagttcttgtacctagaggagaaaggttggaaggaagaggaacagtggggccaatctgggtactgcagatatccagagcctagcctcatctcccctcaaccgacttatgacttaccccaggagaaaacagtggggtacctgggagacttgctaccctctctcttggtctctgatccaacccacctcttcttcatcccctccccctcgtcccttctcataccaataatgcagagtgaggttggtaggctggggctcagagctgctgttccaagtgcaattcatgtactcgacattgaacacaaaacactgaacctctgggaggggcagagtggaaacactgagggagtcagtgggcatagtggtcaggaagaaatctagattggggagaaaatgaaggcagggagggaaagagaaatgatggtcagaaggaggaggccaagcacggtggctcatgtctgtaatcctggtgctttgaaaggctgaggcaggaggatcactagaggccaggagtttgagaccagcctaggcaacatagtgagaccctgcctcaaaagaaagaaagaaacaaacaaacaagaaagaaagaaagaagaagtagcgtgaggcagggaaccctcccccttgcccttcccactccacttttcaattctgcccacatgattgtaatggccagtggcaggcaccagatctctgtacggccccttcccacagccacccttctcaccagccccctccagtcccagatttcccaccagctgtggtgtcttcattcccattgggcgtcagaattgtcgtgttcagccccactcccagcaggggcagctgcaggaataagagggatgtgaatggtaatgatggcttcaacatggcgcttgctcttcattccctgggtgtagtctgtctgtgtcaggaacctgggtccctcacccactacccctccccacccacacgtttcctctgtcatagcttccggtggaaagaaccttataaaccagggctttacagagggtgtggcaaatatgtgctgtgtgacacgggctaagtcctctaggagattaggtgctgctgtaaggtggtaaacagaaactaaagctggatatacaatagtgtcacagactcaaaaatcctcagcccacctagatcctgggaaggatctgttcactgcggccgcatgttcttttttttttttttttttttttttcttttttcaatgtgtgttttttggttttcacctatagaaaaaccggtcgtgactattcgtc

SEQ ID NO: 279 - DNA, 326 bp, unidentified
  source 1..326: mol_type = other DNA
cacgtggtcacgaccggtttttctataggtgaaaaccaaaaaacacacattgaaaaaagatttctcgatcattattattttttggcgatcgcttttttttttttttttagcaaattggtaatactcctgcctccacagttttttttttttttttgcgatcgccttttttttttttttttttttttcttttttcaatgtgtgttttttggttttcacctatagaaaaaccggtcgtgaccacgtgttttttttttttttttttttcagctatagtcacgaccggtttttctataggtgaaaaccaaaaaacacacattgaaaaaaga

SEQ ID NO: 280 - DNA, 323 bp, unidentified
  source 1..323: mol_type = other DNA
tcttttttcaatgtgtgttttttggttttcacctatagaaaaaccggtcgtgacagtatgaatttttttttttttttttatcatcgtcacgaccggtttttctataggtgaaaaccaaaaaacacacattgaaaaaagattttttttttttttttttttttggcgatcgcttttttttttttttttccttctcctctaaatcattaccttctataattttttttttttttttgcgatcgcctttttttttttttgatacattttcttttttcaatgtgtgttttttggttttcacctatagaaaaaccggtcgtgacgatgat

SEQ ID NO: 281 - DNA, 4764 bp, unidentified
  source 1..4764: mol_type = other DNA
ttcatactgtcacgaccggtttttctataggtgaaaaccaaaaaacacacattgaaaaaagattttttttttttttttttttttgaacatgcggccgcgtgaacagatccttcccaggatctaggtgggctgaggatttttgagtctgtgacactattgtatatccagctttagtttctgtttaccaccttacagcagcacctaatctcctagaggacttagcccgtgtcacacagcacatatttgccacaccctctgtaaagccctggtttataaggttctttccaccggaagctatgacagaggaaacgtgtgggtggggaggggtagtgggtgagggacccaggttcctgacacagacagactacacccagggaatgaagagcaagcgccatgttgaagccatcattaccattcacatccctcttattcctgcagctgcccctgctgggagtggggctgaacacgacaattctgacgcccaatgggaatgaagacaccacagctggtgggaaatctgggactggagggggctggtgagaagggtggctgtgggaaggggccgtacagagatctggtgcctgccactggccattacaatcatgtgggcagaattgaaaagtggagtgggaagggcaagggggagggttccctgcctcacgctacttcttctttctttctttcttgtttgtttgtttctttctttcttttgaggcagggtctcactatgttgcctaggctggtctcaaactcctggcctctagtgatcctcctgcctcagcctttcaaagcaccaggattacagacatgagccaccgtgcttggcctcctccttctgaccatcatttctctttccctccctgccttcattttctccccaatctagatttcttcctgaccactatgcccactgactccctcagtgtttccactctgcccctcccagaggttcagtgttttgtgttcaatgtcgagtacatgaattgcacttggaacagcagctctgagccccagcctaccaacctcactctgcattattggtatgagaagggacgagggggaggggatgaagaagaggtgggttggatcagagaccaagagagagggtagcaagtctcccaggtaccccactgttttctcctggggtaagtcataagtcggttgaggggagatgaggctaggctctggatatctgcagtacccagattggccccactgttcctcttccttccaacctttctcctctaggtacaagaactcggataatgataaagtccagaagtgcagccactatctattctctgaagaaatcacttctggctgtcagttgcaaaaaaaggagatccacctctaccaaacatttgttgttcagctccaggacccacgggaacccaggagacaggccacacagatgctaaaactgcagaatctgggtaatttggaaagaaagggtcaagagaccagggatactgtgggacattggagtctacagagtagtgttcttttatcataagggtacatgggcagaaaagaggaggtaggggatcatgatgggaagggaggaggtattaggggcactaccttcaggatcctgacttgtctaggccaggggaatgaccacatatgcacacatatctccagtgatcccctgggctccagagaacctaacacttcacaaactgagtgaatcccagctagaactgaactggaacaacagattcttgaaccactgtttggagcacttggtgcagtaccggactgactgggaccacagctggactgtgagtgactagggacgtgaatgtagcagctaaggccaagaaagtagggctaaaggattcaaccagacagatagaaggacctaatatcaagctcctgttctctgcctcccagcttctctgctcaccccctaccctccctcctccaactcctttcccccctattttctccagtgagttttctttttttcttttcttttctttctttctttcttttttttttttttttgagacagagcctcactctgttgcccaggcttgagtgcagtggggcgatcttgggctcactgcgacctctgtctccctggttcaagtgattctcctgcttcagcctcccaagtagctgggagcatgcacaaccatgcctggctaatttttgtatttttagtaaagacagggttttgccatgttggtcaggctggtcttgaactcctgacctcaggtgatctgcccacctcggcctcccaaagtgctgggattacaggcgtgagccaccattcctgacaccagtgagttttcattagggattccctacccatactcttcctgataccagatagacaagtaaacaaaaggaagccattaaggggatccagaggggaggcattagattcaagtcagtgaagggagcagtgtggcttgagtagtcaagagatgagagagaaactgggcagtagcagagatgacactggtgggtgttcaggagtatgttttaattctcccttctctcatagacacccactttccctcatcctctttctcctcaaggaacaatcagtggattatagacataagttctccttgcctagtgtggatgggcagaaacgctacacgtttcgtgttcggagccgctttaacccactctgtggaagtgctcagcattggagtgaatggagccacccaatccactgggggagcaatacttcaaaaggtaaaatgggcccacatgacccaatccatgagcccaacaccccagcctttctaacaccactgtcttttgctccacttccctgtcactaaagcccctaaacttggtgccccatctctccacactgtctaaccccaacctctagaaatcaaggtttttctgtgtagggttgggttagcgtgttgttagagtaggggagtggattgagaaggaggctgaggggtactcaagggggctatagaatgtataggatttccctgaagcattcctagagagcctgcaaggtgaagatggctttggaaccagctggatctaggctgtgccacatactacctctttggccttggccacatccctaaactcttggattctgtttcctaagatgtaagatggaggtaattgttcctgcctcacaggagctgttgtgaggattaaacagagagtatgtctttagcgcggtgcctggcaccagtgcctggcatgtagtaggggcacaacaaatataaggtccactttgcttttcttttttctatagagaatcctttcctgtttgcattggaagccgtggttatctctgttggctccatgggattgattatcagccttctctgtgtgtatttctggctggaacggtgagatttggagaagcccagaaaaatgaggggaacggtagctgacaatagcagaggagggttttgcagggtctttaggagtaaaggatgagacagtaagtaatgagagattacccaagagggtttggtgatggaaggaagccacaggcacagagaacacagaatcactttatttcatatgggacaactgggagaagggtgataaaaaagctttaacctatgtgctcctgctccctctttctcccctgtcaggacgatgccccgaattcccaccctgaagaacctagaggatcttgttactgaataccacgggaacttttcggtgagaacgctgtcataagcatgctgcagtctatcaactgccaactgcctgccagcaagacagacagagtgtgggggtgggggcagagaggagagggaaggaggccctgcactaactgtcaggatgtggccgaccaaatggggcatggactatacagagagagacacacacagaagtgcagattatagattgaatgaggcagatggcaactggtattgggggcccaggagcctgtgtatcccttctgtaatcaattacagtggttgcagacatcatgagtactcctttggcacagagctcggtcttttacttcctgcccctaattgacccctgacctggacatatctgtctttaggcctggagtggtgtgtctaagggactggctgagagtctgcagccagactacagtgaacgactctgcctcgtcagtgagattcccccaaaaggaggggcccttggggaggggcctggggcctccccatgcaaccagcatagcccctactgggcccccccatgttacaccctaaagcctgaaacctgaaccccaatcctctgacagaagaaccccagggtcctgtagccctaagtggtactaactttccttcattcaacccacctgcgtctcatactcacctcaccccactgtggctgatttggaattttgtgcccccatgtaagcaccccttcatttggcattccccacttgagaattacccttttgccccgaacatgtttttcttctccctcagtctggcccttccttttcgcaggattcttcctccctccctctttccctcccttcctctttccatctaccctccgattgttcctgaaccgatgagaaataaagtttctgttgataatcatcaaaaatgtctgtcatgggggtggggagcaggggaagcctgggatgcaatgagggtgggaggggaagaaaaaggagtagtacattcatgctgtggaggcatctaaaaaaataaaaaaaataaaaaaagcattattgactgatgcatgtaaccttttttttttttttttttttttttcttttttcaatgtgtgttttttggttttcacctatagaaaaaccggtcgtgactatagctg

SEQ ID NO: 282 - DNA, 317 bp, unidentified
  source 1..317: mol_type = other DNA
gtcacgaccggtttttctataggtgaaaaccaaaaaacacacattgaaaaaagagtagtgtatttttttttttttttttatcatctcttttttcaatgtgtgttttttggttttcacctatagaaaaaccggtcgtgacttttttttttttttttttttttgcgaccttttttttttttttttgctagaaagagtactgttctggaaactgacttttttttttttttttggtcgctttttttttttttgatacatttgtcacgaccggtttttctataggtgaaaaccaaaaaacacacattgaaaaaagagatgat

SEQ ID NO: 283 - DNA, 319 bp, unidentified
  source 1..319: mol_type = other DNA
cacgtgtcttttttcaatgtgtgttttttggttttcacctatagaaaaaccggtcgtgactttctcgatcattattattttttgcgaccttttttttttttttttgttgagaatggtgctagtggtagtgaacagtttttttttttttttggtcgctttttttttttttttttttttgtcacgaccggtttttctataggtgaaaaccaaaaaacacacattgaaaaaagacacgtgttttttttttttttttttttgacgaatatcttttttcaatgtgtgttttttggttttcacctatagaaaaaccggtcgtgac

SEQ ID NO: 284 - DNA, 4765 bp, unidentified; identical to SEQ ID NO: 272
  source 1..4765: mol_type = other DNA

SEQ ID NO: 285 - DNA, 320 bp, unidentified
  source 1..320: mol_type = other DNA
cacgtgtcttttttcaatgtgtgttttttggttttcacctatagaaaaaccggtcgtgactttctcgatcattattattttttgcgaccttttttttttttttttagcaaattggtaatactcctgcctccacagttttttttttttttttggtcgctttttttttttttttttttttgtcacgaccggtttttctataggtgaaaaccaaaaaacacacattgaaaaaagacacgtgttttttttttttttttttttcagctatatcttttttcaatgtgtgttttttggttttcacctatagaaaaaccggtcgtgac

SEQ ID NO: 286 - DNA, 317 bp, unidentified
  source 1..317: mol_type = other DNA
gtcacgaccggtttttctataggtgaaaaccaaaaaacacacattgaaaaaagaagtatgaatttttttttttttttttatcatctcttttttcaatgtgtgttttttggttttcacctatagaaaaaccggtcgtgacttttttttttttttttttttttgcgaccttttttttttttttttccttctcctctaaatcattaccttctataattttttttttttttttggtcgctttttttttttttgatacatttgtcacgaccggtttttctataggtgaaaaccaaaaaacacacattgaaaaaagagatgat

SEQ ID NO: 287 - DNA, 4764 bp, unidentified; identical to SEQ ID NO: 275
  source 1..4764: mol_type = other DNA

SEQ ID NO: 288 - DNA, 317 bp, unidentified
  source 1..317: mol_type = other DNA
tcttttttcaatgtgtgttttttggttttcacctatagaaaaaccggtcgtgacgtagtgtatttttttttttttttttatcatcgtcacgaccggtttttctataggtgaaaaccaaaaaacacacattgaaaaaagattttttttttttttttttttttgcgaccttttttttttttttttgctagaaagagtactgttctggaaactgacttttttttttttttttggtcgctttttttttttttgatacattttcttttttcaatgtgtgttttttggttttcacctatagaaaaaccggtcgtgacgatgat

SEQ ID NO: 289 - DNA, 320 bp, unidentified
  source 1..320: mol_type = other DNA
cacgtggtcacgaccggtttttctataggtgaaaaccaaaaaacacacattgaaaaaagatttctcgatcattattattttttgcgaccttttttttttttttttgttgagaatggtgctagtggtagtgaacagttttttttttttttttggtcgcttttttttttttttttttttttcttttttcaatgtgtgttttttggttttcacctatagaaaaaccggtcgtgaccacgtgttttttttttttttttttttgacgaatagtcacgaccggtttttctataggtgaaaaccaaaaaacacacattgaaaaaaga

SEQ ID NO: 290 - DNA, 4765 bp, unidentified; identical to SEQ ID NO: 278
  source 1..4765: mol_type = other DNA

SEQ ID NO: 291 - DNA, 320 bp, unidentified
  source 1..320: mol_type = other DNA
cacgtggtcacgaccggtttttctataggtgaaaaccaaaaaacacacattgaaaaaagatttctcgatcattattattttttgcgaccttttttttttttttttagcaaattggtaatactcctgcctccacagttttttttttttttttggtcgcttttttttttttttttttttttcttttttcaatgtgtgttttttggttttcacctatagaaaaaccggtcgtgaccacgtgttttttttttttttttttttcagctatagtcacgaccggtttttctataggtgaaaaccaaaaaacacacattgaaaaaaga

SEQ ID NO: 292 - DNA, 317 bp, unidentified
  source 1..317: mol_type = other DNA
tcttttttcaatgtgtgttttttggttttcacctatagaaaaaccggtcgtgacagtatgaatttttttttttttttttatcatcgtcacgaccggtttttctataggtgaaaaccaaaaaacacacattgaaaaaagattttttttttttttttttttttgcgaccttttttttttttttttccttctcctctaaatcattaccttctataattttttttttttttttggtcgctttttttttttttgatacattttcttttttcaatgtgtgttttttggttttcacctatagaaaaaccggtcgtgacgatgat

SEQ ID NO: 293 - DNA, 4764 bp, unidentified; identical to SEQ ID NO: 281
  source 1..4764: mol_type = other DNA

SEQ ID NO: 294 - DNA, 329 bp, unidentified
  source 1..329: mol_type = other DNA
gtcacgaccggtttttctataggtgaaaaccaaaaaacacacattgaaaaaagagtagtgtatttttttttttttttttatcatctcttttttcaatgtgtgttttttggttttcacctatagaaaaaccggtcgtgacttttttttttttttttttttttgcggcgatcggcttttttttttttttttgctagaaagagtactgttctggaaactgacttttttttttttttttgccgatcgccgctttttttttttttgatacatttgtcacgaccggtttttctataggtgaaaaccaaaaaacacacattgaaaaaagagatgat

SEQ ID NO: 295 - DNA, 332 bp, unidentified
  source 1..332: mol_type = other DNA
cacgtgtcttttttcaatgtgtgttttttggttttcacctatagaaaaaccggtcgtgactttctcgatcattattattttttgcggcgatcggcttttttttttttttttgttgagaatggtgctagtggtagtgaacagttttttttttttttttgccgatcgccgctttttttttttttttttttttgtcacgaccggtttttctataggtgaaaaccaaaaaacacacattgaaaaaagacacgtgttttttttttttttttttttgacgaatatcttttttcaatgtgtgttttttggttttcacctatagaaaaaccggtcgtgac

SEQ ID NO: 296 - DNA, 4765 bp, unidentified; identical to SEQ ID NO: 272
  source 1..4765: mol_type = other DNA

SEQ ID NO: 297 - DNA, 332 bp, unidentified
  source 1..332: mol_type = other DNA
cacgtgtcttttttcaatgtgtgttttttggttttcacctatagaaaaaccggtcgtgactttctcgatcattattattttttgcggcgatcggcttttttttttttttttagcaaattggtaatactcctgcctccacagttttttttttttttttgccgatcgccgctttttttttttttttttttttgtcacgaccggtttttctataggtgaaaaccaaaaaacacacattgaaaaaagacacgtgttttttttttttttttttttcagctatatcttttttcaatgtgtgttttttggttttcacctatagaaaaaccggtcgtgac

SEQ ID NO: 298 - DNA, 329 bp, unidentified
  source 1..329: mol_type = other DNA
gtcacgaccggtttttctataggtgaaaaccaaaaaacacacattgaaaaaagaagtatgaatttttttttttttttttatcatctcttttttcaatgtgtgttttttggttttcacctatagaaaaaccggtcgtgacttttttttttttttttttttttgcggcgatcggcttttttttttttttttccttctcctctaaatcattaccttctataattttttttttttttttgccgatcgccgctttttttttttttgatacatttgtcacgaccggtttttctataggtgaaaaccaaaaaacacacattgaaaaaagagatgat

SEQ ID NO: 299 - DNA, 4764 bp, unidentified; identical to SEQ ID NO: 275
  source 1..4764: mol_type = other DNA

SEQ ID NO: 300 - DNA, 329 bp, unidentified
  source 1..329: mol_type = other DNA
tcttttttcaatgtgtgttttttggttttcacctatagaaaaaccggtcgtgacgtagtgtatttttttttttttttttatcatcgtcacgaccggtttttctataggtgaaaaccaaaaaacacacattgaaaaaagattttttttttttttttttttttgcggcgatcggcttttttttttttttttgctagaaagagtactgttctggaaactgacttttttttttttttttgccgatcgccgctttttttttttttgatacattttcttttttcaatgtgtgttttttggttttcacctatagaaaaaccggtcgtgacgatgat

SEQ ID NO: 301 - DNA, 332 bp, unidentified
  source 1..332: mol_type = other DNA
cacgtggtcacgaccggtttttctataggtgaaaaccaaaaaacacacattgaaaaaagatttctcgatcattattattttttgcggcgatcggcttttttttttttttttgttgagaatggtgctagtggtagtgaacagttttttttttttttttgccgatcgccgcttttttttttttttttttttttcttttttcaatgtgtgttttttggttttcacctatagaaaaaccggtcgtgaccacgtgttttttttttttttttttttgacgaatagtcacgaccggtttttctataggtgaaaaccaaaaaacacacattgaaaaaaga

SEQ ID NO: 302 - DNA, 4765 bp, unidentified; identical to SEQ ID NO: 278
  source 1..4765: mol_type = other DNA

SEQ ID NO: 303 - DNA, 332 bp, unidentified
  source 1..332: mol_type = other DNA
cacgtggtcacgaccggtttttctataggtgaaaaccaaaaaacacacattgaaaaaagatttctcgatcattattattttttgcggcgatcggcttttttttttttttttagcaaattggtaatactcctgcctccacagttttttttttttttttgccgatcgccgcttttttttttttttttttttttcttttttcaatgtgtgttttttggttttcacctatagaaaaaccggtcgtgaccacgtgttttttttttttttttttttcagctatagtcacgaccggtttttctataggtgaaaaccaaaaaacacacattgaaaaaaga

SEQ ID NO: 304 - DNA, 329 bp, unidentified
  source 1..329: mol_type = other DNA
tcttttttcaatgtgtgttttttggttttcacctatagaaaaaccggtcgtgacagtatgaatttttttttttttttttatcatcgtcacgaccggtttttctataggtgaaaaccaaaaaacacacattgaaaaaagattttttttttttttttttttttgcggcgatcggcttttttttttttttttccttctcctctaaatcattaccttctataattttttttttttttttgccgatcgccgctttttttttttttgatacattttcttttttcaatgtgtgttttttggttttcacctatagaaaaaccggtcgtgacgatgat

SEQ ID NO: 305 - DNA, 4765 bp, unidentified
  source 1..4765: mol_type = other DNA
ttcatactgtcacgaccggtttttctataggtgaaaaccaaaaaacacacattgaaaaaagattttttttttttttttttttttgaacatgcggccgcagtgaacagatccttcccaggatctaggtgggctgaggatttttgagtctgtgacactattgtatatccagctttagtttctgtttaccaccttacagcagcacctaatctcctagaggacttagcccgtgtcacacagcacatatttgccacaccctctgtaaagccctggtttataaggttctttccaccggaagctatgacagaggaaacgtgtgggtggggaggggtagtgggtgagggacccaggttcctgacacagacagactacacccagggaatgaagagcaagcgccatgttgaagccatcattaccattcacatccctcttattcctgcagctgcccctgctgggagtggggctgaacacgacaattctgacgcccaatgggaatgaagacaccacagctggtgggaaatctgggactggagggggctggtgagaagggtggctgtgggaaggggccgtacagagatctggtgcctgccactggccattacaatcatgtgggcagaattgaaaagtggagtgggaagggcaagggggagggttccctgcctcacgctacttcttctttctttctttcttgtttgtttgtttctttctttcttttgaggcagggtctcactatgttgcctaggctggtctcaaactcctggcctctagtgatcctcctgcctcagcctttcaaagcaccaggattacagacatgagccaccgtgcttggcctcctccttctgaccatcatttctctttccctccctgccttcattttctccccaatctagatttcttcctgaccactatgcccactgactccctcagtgtttccactctgcccctcccagaggttcagtgttttgtgttcaatgtcgagtacatgaattgcacttggaacagcagctctgagccccagcctaccaacctcactctgcattattggtatgagaagggacgagggggaggggatgaagaagaggtgggttggatcagagaccaagagagagggtagcaagtctcccaggtaccccactgttttctcctggggtaagtcataagtcggttgaggggagatgaggctaggctctggatatctgcagtacccagattggccccactgttcctcttccttccaacctttctcctctaggtacaagaactcggataatgataaagtccagaagtgcagccactatctattctctgaagaaatcacttctggctgtcagttgcaaaaaaaggagatccacctctaccaaacatttgttgttcagctccaggacccacgggaacccaggagacaggccacacagatgctaaaactgcagaatctgggtaatttggaaagaaagggtcaagagaccagggatactgtgggacattggagtctacagagtagtgttcttttatcataagggtacatgggcagaaaagaggaggtaggggatcatgatgggaagggaggaggtattaggggcactaccttcaggatcctgacttgtctaggccaggggaatgaccacatatgcacacatatctccagtgatcccctgggctccagagaacctaacacttcacaaactgagtgaatcccagctagaactgaactggaacaacagattcttgaaccactgtttggagcacttggtgcagtaccggactgactgggaccacagctggactgtgagtgactagggacgtgaatgtagcagctaaggccaagaaagtagggctaaaggattcaaccagacagatagaaggacctaatatcaagctcctgttctctgcctcccagcttctctgctcaccccctaccctccctcctccaactcctttcccccctattttctccagtgagttttctttttttcttttcttttctttctttctttcttttttttttttttttgagacagagcctcactctgttgcccaggcttgagtgcagtggggcgatcttgggctcactgcgacctctgtctccctggttcaagtgattctcctgcttcagcctcccaagtagctgggagcatgcacaaccatgcctggctaatttttgtatttttagtaaagacagggttttgccatgttggtcaggctggtcttgaactcctgacctcaggtgatctgcccacctcggcctcccaaagtgctgggattacaggcgtgagccaccattcctgacaccagtgagttttcattagggattccctacccatactcttcctgataccagatagacaagtaaacaaaaggaagccattaaggggatccagaggggaggcattagattcaagtcagtgaagggagcagtgtggcttgagtagtcaagagatgagagagaaactgggcagtagcagagatgacactggtgggtgttcaggagtatgttttaattctcccttctctcatagacacccactttccctcatcctctttctcctcaaggaacaatcagtggattatagacataagttctccttgcctagtgtggatgggcagaaacgctacacgtttcgtgttcggagccgctttaacccactctgtggaagtgctcagcattggagtgaatggagccacccaatccactgggggagcaatacttcaaaaggtaaaatgggcccacatgacccaatccatgagcccaacaccccagcctttctaacaccactgtcttttgctccacttccctgtcactaaagcccctaaacttggtgccccatctctccacactgtctaaccccaacctctagaaatcaaggtttttctgtgtagggttgggttagcgtgttgttagagtaggggagtggattgagaaggaggctgaggggtactcaagggggctatagaatgtataggatttccctgaagcattcctagagagcctgcaaggtgaagatggctttggaaccagctggatctaggctgtgccacatactacctctttggccttggccacatccctaaactcttggattctgtttcctaagatgtaagatggaggtaattgttcctgcctcacaggagctgttgtgaggattaaacagagagtatgtctttagcgcggtgcctggcaccagtgcctggcatgtagtaggggcacaacaaatataaggtccactttgcttttcttttttctatagagaatcctttcctgtttgcattggaagccgtggttatctctgttggctccatgggattgattatcagccttctctgtgtgtatttctggctggaacggtgagatttggagaagcccagaaaaatgaggggaacggtagctgacaatagcagaggagggttttgcagggtctttaggagtaaaggatgagacagtaagtaatgagagattacccaagagggtttggtgatggaaggaagccacaggcacagagaacacagaatcactttatttcatatgggacaactgggagaagggtgataaaaaagctttaacctatgtgctcctgctccctctttctcccctgtcaggacgatgccccgaattcccaccctgaagaacctagaggatcttgttactgaataccacgggaacttttcggtgagaacgctgtcataagcatgctgcagtctatcaactgccaactgcctgccagcaagacagacagagtgtgggggtgggggcagagaggagagggaaggaggccctgcactaactgtcaggatgtggccgaccaaatggggcatggactatacagagagagacacacacagaagtgcagattatagattgaatgaggcagatggcaactggtattgggggcccaggagcctgtgtatcccttctgtaatcaattacagtggttgcagacatcatgagtactcctttggcacagagctcggtcttttacttcctgcccctaattgacccctgacctggacatatctgtctttaggcctggagtggtgtgtctaagggactggctgagagtctgcagccagactacagtgaacgactctgcctcgtcagtgagattcccccaaaaggaggggcccttggggaggggcctggggcctccccatgcaaccagcatagcccctactgggcccccccatgttacaccctaaagcctgaaacctgaaccccaatcctctgacagaagaaccccagggtcctgtagccctaagtggtactaactttccttcattcaacccacctgcgtctcatactcacctcaccccactgtggctgatttggaattttgtgcccccatgtaagcaccccttcatttggcattccccacttgagaattacccttttgccccgaacatgtttttcttctccctcagtctggcccttccttttcgcaggattcttcctccctccctctttccctcccttcctctttccatctaccctccgattgttcctgaaccgatgagaaataaagtttctgttgataatcatcaaaaatgtctgtcatgggggtggggagcaggggaagcctgggatgcaatgagggtgggaggggaagaaaaaggagtagtacattcatgctgtggaggcatctaaaaaaataaaaaaaataaaaaaagcattattgactgatgcatgtaaccttttttttttttttttttttttttcttttttcaatgtgtgttttttggttttcacctatagaaaaaccggtcgtgactatagctg

SEQ ID NO: 306 - DNA, 257 bp, unidentified
  source 1..257: mol_type = other DNA
tagttgaagtcggaagtttacatacacttaaggtagtgtatttttttttttttttttatcatccttaagtgtatgtaaacttccgacttcaactattttttttttttttttttttttggcgatcgcttttttttttttttttgctagaaagagtactgttctggaaactgacttttttttttttttttgcgatcgcctttttttttttttgatacattttagttgaagtcggaagtttacatacacttaaggatgat

SEQ ID NO: 307 - DNA, 260 bp, unidentified
  source 1..260: mol_type = other DNA
cacgtgcttaagtgtatgtaaacttccgacttcaactatttctcgatcattattattttttggcgatcgcttttttttttttttttgttgagaatggtgctagtggtagtgaacagttttttttttttttttgcgatcgccttttttttttttttttttttttagttgaagtcggaagtttacatacacttaagcacgtgttttttttttttttttttttgacgaatacttaagtgtatgtaaacttccgacttcaacta

SEQ ID NO: 308 - DNA, 4721 bp, unidentified
  source 1..4721: mol_type = other DNA
tacactaccttaagtgtatgtaaacttccgacttcaactattttttttttttttttttttttggttacatgcatcagtcaataatgctttttttattttttttatttttttagatgcctccacagcatgaatgtactactcctttttcttcccctcccaccctcattgcatcccaggcttcccctgctccccacccccatgacagacatttttgatgattatcaacagaaactttatttctcatcggttcaggaacaatcggagggtagatggaaagaggaagggagggaaagagggagggaggaagaatcctgcgaaaaggaagggccagactgagggagaagaaaaacatgttcggggcaaaagggtaattctcaagtggggaatgccaaatgaaggggtgcttacatgggggcacaaaattccaaatcagccacagtggggtgaggtgagtatgagacgcaggtgggttgaatgaaggaaagttagtaccacttagggctacaggaccctggggttcttctgtcagaggattggggttcaggtttcaggctttagggtgtaacatgggggggcccagtaggggctatgctggttgcatggggaggccccaggcccctccccaagggcccctccttttgggggaatctcactgacgaggcagagtcgttcactgtagtctggctgcagactctcagccagtcccttagacacaccactccaggcctaaagacagatatgtccaggtcaggggtcaattaggggcaggaagtaaaagaccgagctctgtgccaaaggagtactcatgatgtctgcaaccactgtaattgattacagaagggatacacaggctcctgggcccccaataccagttgccatctgcctcattcaatctataatctgcacttctgtgtgtgtctctctctgtatagtccatgccccatttggtcggccacatcctgacagttagtgcagggcctccttccctctcctctctgcccccacccccacactctgtctgtcttgctggcaggcagttggcagttgatagactgcagcatgcttatgacagcgttctcaccgaaaagttcccgtggtattcagtaacaagatcctctaggttcttcagggtgggaattcggggcatcgtcctgacaggggagaaagagggagcaggagcacataggttaaagcttttttatcacccttctcccagttgtcccatatgaaataaagtgattctgtgttctctgtgcctgtggcttccttccatcaccaaaccctcttgggtaatctctcattacttactgtctcatcctttactcctaaagaccctgcaaaaccctcctctgctattgtcagctaccgttcccctcatttttctgggcttctccaaatctcaccgttccagccagaaatacacacagagaaggctgataatcaatcccatggagccaacagagataaccacggcttccaatgcaaacaggaaaggattctctatagaaaaaagaaaagcaaagtggaccttatatttgttgtgcccctactacatgccaggcactggtgccaggcaccgcgctaaagacatactctctgtttaatcctcacaacagctcctgtgaggcaggaacaattacctccatcttacatcttaggaaacagaatccaagagtttagggatgtggccaaggccaaagaggtagtatgtggcacagcctagatccagctggttccaaagccatcttcaccttgcaggctctctaggaatgcttcagggaaatcctatacattctatagcccccttgagtacccctcagcctccttctcaatccactcccctactctaacaacacgctaacccaaccctacacagaaaaaccttgatttctagaggttggggttagacagtgtggagagatggggcaccaagtttaggggctttagtgacagggaagtggagcaaaagacagtggtgttagaaaggctggggtgttgggctcatggattgggtcatgtgggcccattttaccttttgaagtattgctcccccagtggattgggtggctccattcactccaatgctgagcacttccacagagtgggttaaagcggctccgaacacgaaacgtgtagcgtttctgcccatccacactaggcaaggagaacttatgtctataatccactgattgttccttgaggagaaagaggatgagggaaagtgggtgtctatgagagaagggagaattaaaacatactcctgaacacccaccagtgtcatctctgctactgcccagtttctctctcatctcttgactactcaagccacactgctcccttcactgacttgaatctaatgcctcccctctggatccccttaatggcttccttttgtttacttgtctatctggtatcaggaagagtatgggtagggaatccctaatgaaaactcactggtgtcaggaatggtggctcacgcctgtaatcccagcactttgggaggccgaggtgggcagatcacctgaggtcaggagttcaagaccagcctgaccaacatggcaaaaccctgtctttactaaaaatacaaaaattagccaggcatggttgtgcatgctcccagctacttgggaggctgaagcaggagaatcacttgaaccagggagacagaggtcgcagtgagcccaagatcgccccactgcactcaagcctgggcaacagagtgaggctctgtctcaaaaaaaaaaaaaaaagaaagaaagaaagaaaagaaaagaaaaaaagaaaactcactggagaaaataggggggaaaggagttggaggagggagggtagggggtgagcagagaagctgggaggcagagaacaggagcttgatattaggtccttctatctgtctggttgaatcctttagccctactttcttggccttagctgctacattcacgtccctagtcactcacagtccagctgtggtcccagtcagtccggtactgcaccaagtgctccaaacagtggttcaagaatctgttgttccagttcagttctagctgggattcactcagtttgtgaagtgttaggttctctggagcccaggggatcactggagatatgtgtgcatatgtggtcattcccctggcctagacaagtcaggatcctgaaggtagtgcccctaatacctcctcccttcccatcatgatcccctacctcctcttttctgcccatgtacccttatgataaaagaacactactctgtagactccaatgtcccacagtatccctggtctcttgaccctttctttccaaattacccagattctgcagttttagcatctgtgtggcctgtctcctgggttcccgtgggtcctggagctgaacaacaaatgtttggtagaggtggatctcctttttttgcaactgacagccagaagtgatttcttcagagaatagatagtggctgcacttctggactttatcattatccgagttcttgtacctagaggagaaaggttggaaggaagaggaacagtggggccaatctgggtactgcagatatccagagcctagcctcatctcccctcaaccgacttatgacttaccccaggagaaaacagtggggtacctgggagacttgctaccctctctcttggtctctgatccaacccacctcttcttcatcccctccccctcgtcccttctcataccaataatgcagagtgaggttggtaggctggggctcagagctgctgttccaagtgcaattcatgtactcgacattgaacacaaaacactgaacctctgggaggggcagagtggaaacactgagggagtcagtgggcatagtggtcaggaagaaatctagattggggagaaaatgaaggcagggagggaaagagaaatgatggtcagaaggaggaggccaagcacggtggctcatgtctgtaatcctggtgctttgaaaggctgaggcaggaggatcactagaggccaggagtttgagaccagcctaggcaacatagtgagaccctgcctcaaaagaaagaaagaaacaaacaaacaagaaagaaagaaagaagaagtagcgtgaggcagggaaccctcccccttgcccttcccactccacttttcaattctgcccacatgattgtaatggccagtggcaggcaccagatctctgtacggccccttcccacagccacccttctcaccagccccctccagtcccagatttcccaccagctgtggtgtcttcattcccattgggcgtcagaattgtcgtgttcagccccactcccagcaggggcagctgcaggaataagagggatgtgaatggtaatgatggcttcaacatggcgcttgctcttcattccctgggtgtagtctgtctgtgtcaggaacctgggtccctcacccactacccctccccacccacacgtttcctctgtcatagcttccggtggaaagaaccttataaaccagggctttacagagggtgtggcaaatatgtgctgtgtgacacgggctaagtcctctaggagattaggtgctgctgtaaggtggtaaacagaaactaaagctggatatacaatagtgtcacagactcaaaaatcctcagcccacctagatcctgggaaggatctgttcactgcggccgcatgttcttttttttttttttttttttttttagttgaagtcggaagtttacatacacttaagtattcgtc

SEQ ID NO: 309 - DNA, 260 bp, unidentified
  source 1..260: mol_type = other DNA
cacgtgcttaagtgtatgtaaacttccgacttcaactatttctcgatcattattattttttggcgatcgcttttttttttttttttagcaaattggtaatactcctgcctccacagttttttttttttttttgcgatcgccttttttttttttttttttttttagttgaagtcggaagtttacatacacttaagcacgtgttttttttttttttttttttcagctatacttaagtgtatgtaaacttccgacttcaacta

SEQ ID NO: 310 - DNA, 257 bp, unidentified
  source 1..257: mol_type = other DNA
tagttgaagtcggaagtttacatacacttaagagtatgaatttttttttttttttttatcatccttaagtgtatgtaaacttccgacttcaactattttttttttttttttttttttggcgatcgcttttttttttttttttccttctcctctaaatcattaccttctataattttttttttttttttgcgatcgcctttttttttttttgatacattttagttgaagtcggaagtttacatacacttaaggatgat

SEQ ID NO: 311 - DNA, 4720 bp, unidentified
  source 1..4720: mol_type = other DNA
ttcatactcttaagtgtatgtaaacttccgacttcaactattttttttttttttttttttttgaacatgcggccgcgtgaacagatccttcccaggatctaggtgggctgaggatttttgagtctgtgacactattgtatatccagctttagtttctgtttaccaccttacagcagcacctaatctcctagaggacttagcccgtgtcacacagcacatatttgccacaccctctgtaaagccctggtttataaggttctttccaccggaagctatgacagaggaaacgtgtgggtggggaggggtagtgggtgagggacccaggttcctgacacagacagactacacccagggaatgaagagcaagcgccatgttgaagccatcattaccattcacatccctcttattcctgcagctgcccctgctgggagtggggctgaacacgacaattctgacgcccaatgggaatgaagacaccacagctggtgggaaatctgggactggagggggctggtgagaagggtggctgtgggaaggggccgtacagagatctggtgcctgccactggccattacaatcatgtgggcagaattgaaaagtggagtgggaagggcaagggggagggttccctgcctcacgctacttcttctttctttctttcttgtttgtttgtttctttctttcttttgaggcagggtctcactatgttgcctaggctggtctcaaactcctggcctctagtgatcctcctgcctcagcctttcaaagcaccaggattacagacatgagccaccgtgcttggcctcctccttctgaccatcatttctctttccctccctgccttcattttctccccaatctagatttcttcctgaccactatgcccactgactccctcagtgtttccactctgcccctcccagaggttcagtgttttgtgttcaatgtcgagtacatgaattgcacttggaacagcagctctgagccccagcctaccaacctcactctgcattattggtatgagaagggacgagggggaggggatgaagaagaggtgggttggatcagagaccaagagagagggtagcaagtctcccaggtaccccactgttttctcctggggtaagtcataagtcggttgaggggagatgaggctaggctctggatatctgcagtacccagattggccccactgttcctcttccttccaacctttctcctctaggtacaagaactcggataatgataaagtccagaagtgcagccactatctattctctgaagaaatcacttctggctgtcagttgcaaaaaaaggagatccacctctaccaaacatttgttgttcagctccaggacccacgggaacccaggagacaggccacacagatgctaaaactgcagaatctgggtaatttggaaagaaagggtcaagagaccagggatactgtgggacattggagtctacagagtagtgttcttttatcataagggtacatgggcagaaaagaggaggtaggggatcatgatgggaagggaggaggtattaggggcactaccttcaggatcctgacttgtctaggccaggggaatgaccacatatgcacacatatctccagtgatcccctgggctccagagaacctaacacttcacaaactgagtgaatcccagctagaactgaactggaacaacagattcttgaaccactgtttggagcacttggtgcagtaccggactgactgggaccacagctggactgtgagtgactagggacgtgaatgtagcagctaaggccaagaaagtagggctaaaggattcaaccagacagatagaaggacctaatatcaagctcctgttctctgcctcccagcttctctgctcaccccctaccctccctcctccaactcctttcccccctattttctccagtgagttttctttttttcttttcttttctttctttctttcttttttttttttttttgagacagagcctcactctgttgcccaggcttgagtgcagtggggcgatcttgggctcactgcgacctctgtctccctggttcaagtgattctcctgcttcagcctcccaagtagctgggagcatgcacaaccatgcctggctaatttttgtatttttagtaaagacagggttttgccatgttggtcaggctggtcttgaactcctgacctcaggtgatctgcccacctcggcctcccaaagtgctgggattacaggcgtgagccaccattcctgacaccagtgagttttcattagggattccctacccatactcttcctgataccagatagacaagtaaacaaaaggaagccattaaggggatccagaggggaggcattagattcaagtcagtgaagggagcagtgtggcttgagtagtcaagagatgagagagaaactgggcagtagcagagatgacactggtgggtgttcaggagtatgttttaattctcccttctctcatagacacccactttccctcatcctctttctcctcaaggaacaatcagtggattatagacataagttctccttgcctagtgtggatgggcagaaacgctacacgtttcgtgttcggagccgctttaacccactctgtggaagtgctcagcattggagtgaatggagccacccaatccactgggggagcaatacttcaaaaggtaaaatgggcccacatgacccaatccatgagcccaacaccccagcctttctaacaccactgtcttttgctccacttccctgtcactaaagcccctaaacttggtgccccatctctccacactgtctaaccccaacctctagaaatcaaggtttttctgtgtagggttgggttagcgtgttgttagagtaggggagtggattgagaaggaggctgaggggtactcaagggggctatagaatgtataggatttccctgaagcattcctagagagcctgcaaggtgaagatggctttggaaccagctggatctaggctgtgccacatactacctctttggccttggccacatccctaaactcttggattctgtttcctaagatgtaagatggaggtaattgttcctgcctcacaggagctgttgtgaggattaaacagagagtatgtctttagcgcggtgcctggcaccagtgcctggcatgtagtaggggcacaacaaatataaggtccactttgcttttcttttttctatagagaatcctttcctgtttgcattggaagccgtggttatctctgttggctccatgggattgattatcagccttctctgtgtgtatttctggctggaacggtgagatttggagaagcccagaaaaatgaggggaacggtagctgacaatagcagaggagggttttgcagggtctttaggagtaaaggatgagacagtaagtaatgagagattacccaagagggtttggtgatggaaggaagccacaggcacagagaacacagaatcactttatttcatatgggacaactgggagaagggtgataaaaaagctttaacctatgtgctcctgctccctctttctcccctgtcaggacgatgccccgaattcccaccctgaagaacctagaggatcttgttactgaataccacgggaacttttcggtgagaacgctgtcataagcatgctgcagtctatcaactgccaactgcctgccagcaagacagacagagtgtgggggtgggggcagagaggagagggaaggaggccctgcactaactgtcaggatgtggccgaccaaatggggcatggactatacagagagagacacacacagaagtgcagattatagattgaatgaggcagatggcaactggtattgggggcccaggagcctgtgtatcccttctgtaatcaattacagtggttgcagacatcatgagtactcctttggcacagagctcggtcttttacttcctgcccctaattgacccctgacctggacatatctgtctttaggcctggagtggtgtgtctaagggactggctgagagtctgcagccagactacagtgaacgactctgcctcgtcagtgagattcccccaaaaggaggggcccttggggaggggcctggggcctccccatgcaaccagcatagcccctactgggcccccccatgttacaccctaaagcctgaaacctgaaccccaatcctctgacagaagaaccccagggtcctgtagccctaagtggtactaactttccttcattcaacccacctgcgtctcatactcacctcaccccactgtggctgatttggaattttgtgcccccatgtaagcaccccttcatttggcattccccacttgagaattacccttttgccccgaacatgtttttcttctccctcagtctggcccttccttttcgcaggattcttcctccctccctctttccctcccttcctctttccatctaccctccgattgttcctgaaccgatgagaaataaagtttctgttgataatcatcaaaaatgtctgtcatgggggtggggagcaggggaagcctgggatgcaatgagggtgggaggggaagaaaaaggagtagtacattcatgctgtggaggcatctaaaaaaataaaaaaaataaaaaaagcattattgactgatgcatgtaaccttttttttttttttttttttttttagttgaagtcggaagtttacatacacttaagtatagctg

SEQ ID NO: 312 - DNA, 257 bp, unidentified
  source 1..257: mol_type = other DNA
cttaagtgtatgtaaacttccgacttcaactagtagtgtatttttttttttttttttatcatctagttgaagtcggaagtttacatacacttaagttttttttttttttttttttttggcgatcgcttttttttttttttttgctagaaagagtactgttctggaaactgacttttttttttttttttgcgatcgcctttttttttttttgatacatttcttaagtgtatgtaaacttccgacttcaactagatgat

SEQ ID NO: 313 - DNA, 260 bp, unidentified
  source 1..260: mol_type = other DNA
cacgtgtagttgaagtcggaagtttacatacacttaagtttctcgatcattattattttttggcgatcgcttttttttttttttttgttgagaatggtgctagtggtagtgaacagttttttttttttttttgcgatcgcctttttttttttttttttttttcttaagtgtatgtaaacttccgacttcaactacacgtgttttttttttttttttttttgacgaatatagttgaagtcggaagtttacatacacttaag

SEQ ID NO: 314 - DNA, 4721 bp, unidentified
  source 1..4721: mol_type = other DNA
tacactactagttgaagtcggaagtttacatacacttaagttttttttttttttttttttttggttacatgcatcagtcaataatgctttttttattttttttatttttttagatgcctccacagcatgaatgtactactcctttttcttcccctcccaccctcattgcatcccaggcttcccctgctccccacccccatgacagacatttttgatgattatcaacagaaactttatttctcatcggttcaggaacaatcggagggtagatggaaagaggaagggagggaaagagggagggaggaagaatcctgcgaaaaggaagggccagactgagggagaagaaaaacatgttcggggcaaaagggtaattctcaagtggggaatgccaaatgaaggggtgcttacatgggggcacaaaattccaaatcagccacagtggggtgaggtgagtatgagacgcaggtgggttgaatgaaggaaagttagtaccacttagggctacaggaccctggggttcttctgtcagaggattggggttcaggtttcaggctttagggtgtaacatgggggggcccagtaggggctatgctggttgcatggggaggccccaggcccctccccaagggcccctccttttgggggaatctcactgacgaggcagagtcgttcactgtagtctggctgcagactctcagccagtcccttagacacaccactccaggcctaaagacagatatgtccaggtcaggggtcaattaggggcaggaagtaaaagaccgagctctgtgccaaaggagtactcatgatgtctgcaaccactgtaattgattacagaagggatacacaggctcctgggcccccaataccagttgccatctgcctcattcaatctataatctgcacttctgtgtgtgtctctctctgtatagtccatgccccatttggtcggccacatcctgacagttagtgcagggcctccttccctctcctctctgcccccacccccacactctgtctgtcttgctggcaggcagttggcagttgatagactgcagcatgcttatgacagcgttctcaccgaaaagttcccgtggtattcagtaacaagatcctctaggttcttcagggtgggaattcggggcatcgtcctgacaggggagaaagagggagcaggagcacataggttaaagcttttttatcacccttctcccagttgtcccatatgaaataaagtgattctgtgttctctgtgcctgtggcttccttccatcaccaaaccctcttgggtaatctctcattacttactgtctcatcctttactcctaaagaccctgcaaaaccctcctctgctattgtcagctaccgttcccctcatttttctgggcttctccaaatctcaccgttccagccagaaatacacacagagaaggctgataatcaatcccatggagccaacagagataaccacggcttccaatgcaaacaggaaaggattctctatagaaaaaagaaaagcaaagtggaccttatatttgttgtgcccctactacatgccaggcactggtgccaggcaccgcgctaaagacatactctctgtttaatcctcacaacagctcctgtgaggcaggaacaattacctccatcttacatcttaggaaacagaatccaagagtttagggatgtggccaaggccaaagaggtagtatgtggcacagcctagatccagctggttccaaagccatcttcaccttgcaggctctctaggaatgcttcagggaaatcctatacattctatagcccccttgagtacccctcagcctccttctcaatccactcccctactctaacaacacgctaacccaaccctacacagaaaaaccttgatttctagaggttggggttagacagtgtggagagatggggcaccaagtttaggggctttagtgacagggaagtggagcaaaagacagtggtgttagaaaggctggggtgttgggctcatggattgggtcatgtgggcccattttaccttttgaagtattgctcccccagtggattgggtggctccattcactccaatgctgagcacttccacagagtgggttaaagcggctccgaacacgaaacgtgtagcgtttctgcccatccacactaggcaaggagaacttatgtctataatccactgattgttccttgaggagaaagaggatgagggaaagtgggtgtctatgagagaagggagaattaaaacatactcctgaacacccaccagtgtcatctctgctactgcccagtttctctctcatctcttgactactcaagccacactgctcccttcactgacttgaatctaatgcctcccctctggatccccttaatggcttccttttgtttacttgtctatctggtatcaggaagagtatgggtagggaatccctaatgaaaactcactggtgtcaggaatggtggctcacgcctgtaatcccagcactttgggaggccgaggtgggcagatcacctgaggtcaggagttcaagaccagcctgaccaacatggcaaaaccctgtctttactaaaaatacaaaaattagccaggcatggttgtgcatgctcccagctacttgggaggctgaagcaggagaatcacttgaaccagggagacagaggtcgcagtgagcccaagatcgccccactgcactcaagcctgggcaacagagtgaggctctgtctcaaaaaaaaaaaaaaaagaaagaaagaaagaaaagaaaagaaaaaaagaaaactcactggagaaaataggggggaaaggagttggaggagggagggtagggggtgagcagagaagctgggaggcagagaacaggagcttgatattaggtccttctatctgtctggttgaatcctttagccctactttcttggccttagctgctacattcacgtccctagtcactcacagtccagctgtggtcccagtcagtccggtactgcaccaagtgctccaaacagtggttcaagaatctgttgttccagttcagttctagctgggattcactcagtttgtgaagtgttaggttctctggagcccaggggatcactggagatatgtgtgcatatgtggtcattcccctggcctagacaagtcaggatcctgaaggtagtgcccctaatacctcctcccttcccatcatgatcccctacctcctcttttctgcccatgtacccttatgataaaagaacactactctgtagactccaatgtcccacagtatccctggtctcttgaccctttctttccaaattacccagattctgcagttttagcatctgtgtggcctgtctcctgggttcccgtgggtcctggagctgaacaacaaatgtttggtagaggtggatctcctttttttgcaactgacagccagaagtgatttcttcagagaatagatagtggctgcacttctggactttatcattatccgagttcttgtacctagaggagaaaggttggaaggaagaggaacagtggggccaatctgggtactgcagatatccagagcctagcctcatctcccctcaaccgacttatgacttaccccaggagaaaacagtggggtacctgggagacttgctaccctctctcttggtctctgatccaacccacctcttcttcatcccctccccctcgtcccttctcataccaataatgcagagtgaggttggtaggctggggctcagagctgctgttccaagtgcaattcatgtactcgacattgaacacaaaacactgaacctctgggaggggcagagtggaaacactgagggagtcagtgggcatagtggtcaggaagaaatctagattggggagaaaatgaaggcagggagggaaagagaaatgatggtcagaaggaggaggccaagcacggtggctcatgtctgtaatcctggtgctttgaaaggctgaggcaggaggatcactagaggccaggagtttgagaccagcctaggcaacatagtgagaccctgcctcaaaagaaagaaagaaacaaacaaacaagaaagaaagaaagaagaagtagcgtgaggcagggaaccctcccccttgcccttcccactccacttttcaattctgcccacatgattgtaatggccagtggcaggcaccagatctctgtacggccccttcccacagccacccttctcaccagccccctccagtcccagatttcccaccagctgtggtgtcttcattcccattgggcgtcagaattgtcgtgttcagccccactcccagcaggggcagctgcaggaataagagggatgtgaatggtaatgatggcttcaacatggcgcttgctcttcattccctgggtgtagtctgtctgtgtcaggaacctgggtccctcacccactacccctccccacccacacgtttcctctgtcatagcttccggtggaaagaaccttataaaccagggctttacagagggtgtggcaaatatgtgctgtgtgacacgggctaagtcctctaggagattaggtgctgctgtaaggtggtaaacagaaactaaagctggatatacaatagtgtcacagactcaaaaatcctcagcccacctagatcctgggaaggatctgttcactgcggccgcatgttctttttttttttttttttttttttcttaagtgtatgtaaacttccgacttcaactatattcgtc

SEQ ID NO: 315 - DNA, 260 bp, unidentified
  source 1..260: mol_type = other DNA
cacgtgtagttgaagtcggaagtttacatacacttaagtttctcgatcattattattttttggcgatcgcttttttttttttttttagcaaattggtaatactcctgcctccacagttttttttttttttttgcgatcgcctttttttttttttttttttttcttaagtgtatgtaaacttccgacttcaactacacgtgttttttttttttttttttttcagctatatagttgaagtcggaagtttacatacacttaag

SEQ ID NO: 316 - DNA, 257 bp, unidentified
  source 1..257: mol_type = other DNA
cttaagtgtatgtaaacttccgacttcaactaagtatgaatttttttttttttttttatcatctagttgaagtcggaagtttacatacacttaagttttttttttttttttttttttggcgatcgcttttttttttttttttccttctcctctaaatcattaccttctataattttttttttttttttgcgatcgcctttttttttttttgatacatttcttaagtgtatgtaaacttccgacttcaactagatgat

SEQ ID NO: 317 - DNA, 4720 bp, unidentified
  source 1..4720: mol_type = other DNA
ttcatacttagttgaagtcggaagtttacatacacttaagttttttttttttttttttttttgaacatgcggccgcgtgaacagatccttcccaggatctaggtgggctgaggatttttgagtctgtgacactattgtatatccagctttagtttctgtttaccaccttacagcagcacctaatctcctagaggacttagcccgtgtcacacagcacatatttgccacaccctctgtaaagccctggtttataaggttctttccaccggaagctatgacagaggaaacgtgtgggtggggaggggtagtgggtgagggacccaggttcctgacacagacagactacacccagggaatgaagagcaagcgccatgttgaagccatcattaccattcacatccctcttattcctgcagctgcccctgctgggagtggggctgaacacgacaattctgacgcccaatgggaatgaagacaccacagctggtgggaaatctgggactggagggggctggtgagaagggtggctgtgggaaggggccgtacagagatctggtgcctgccactggccattacaatcatgtgggcagaattgaaaagtggagtgggaagggcaagggggagggttccctgcctcacgctacttcttctttctttctttcttgtttgtttgtttctttctttcttttgaggcagggtctcactatgttgcctaggctggtctcaaactcctggcctctagtgatcctcctgcctcagcctttcaaagcaccaggattacagacatgagccaccgtgcttggcctcctccttctgaccatcatttctctttccctccctgccttcattttctccccaatctagatttcttcctgaccactatgcccactgactccctcagtgtttccactctgcccctcccagaggttcagtgttttgtgttcaatgtcgagtacatgaattgcacttggaacagcagctctgagccccagcctaccaacctcactctgcattattggtatgagaagggacgagggggaggggatgaagaagaggtgggttggatcagagaccaagagagagggtagcaagtctcccaggtaccccactgttttctcctggggtaagtcataagtcggttgaggggagatgaggctaggctctggatatctgcagtacccagattggccccactgttcctcttccttccaacctttctcctctaggtacaagaactcggataatgataaagtccagaagtgcagccactatctattctctgaagaaatcacttctggctgtcagttgcaaaaaaaggagatccacctctaccaaacatttgttgttcagctccaggacccacgggaacccaggagacaggccacacagatgctaaaactgcagaatctgggtaatttggaaagaaagggtcaagagaccagggatactgtgggacattggagtctacagagtagtgttcttttatcataagggtacatgggcagaaaagaggaggtaggggatcatgatgggaagggaggaggtattaggggcactaccttcaggatcctgacttgtctaggccaggggaatgaccacatatgcacacatatctccagtgatcccctgggctccagagaacctaacacttcacaaactgagtgaatcccagctagaactgaactggaacaacagattcttgaaccactgtttggagcacttggtgcagtaccggactgactgggaccacagctggactgtgagtgactagggacgtgaatgtagcagctaaggccaagaaagtagggctaaaggattcaaccagacagatagaaggacctaatatcaagctcctgttctctgcctcccagcttctctgctcaccccctaccctccctcctccaactcctttcccccctattttctccagtgagttttctttttttcttttcttttctttctttctttcttttttttttttttttgagacagagcctcactctgttgcccaggcttgagtgcagtggggcgatcttgggctcactgcgacctctgtctccctggttcaagtgattctcctgcttcagcctcccaagtagctgggagcatgcacaaccatgcctggctaatttttgtatttttagtaaagacagggttttgccatgttggtcaggctggtcttgaactcctgacctcaggtgatctgcccacctcggcctcccaaagtgctgggattacaggcgtgagccaccattcctgacaccagtgagttttcattagggattccctacccatactcttcctgataccagatagacaagtaaacaaaaggaagccattaaggggatccagaggggaggcattagattcaagtcagtgaagggagcagtgtggcttgagtagtcaagagatgagagagaaactgggcagtagcagagatgacactggtgggtgttcaggagtatgttttaattctcccttctctcatagacacccactttccctcatcctctttctcctcaaggaacaatcagtggattatagacataagttctccttgcctagtgtggatgggcagaaacgctacacgtttcgtgttcggagccgctttaacccactctgtggaagtgctcagcattggagtgaatggagccacccaatccactgggggagcaatacttcaaaaggtaaaatgggcccacatgacccaatccatgagcccaacaccccagcctttctaacaccactgtcttttgctccacttccctgtcactaaagcccctaaacttggtgccccatctctccacactgtctaaccccaacctctagaaatcaaggtttttctgtgtagggttgggttagcgtgttgttagagtaggggagtggattgagaaggaggctgaggggtactcaagggggctatagaatgtataggatttccctgaagcattcctagagagcctgcaaggtgaagatggctttggaaccagctggatctaggctgtgccacatactacctctttggccttggccacatccctaaactcttggattctgtttcctaagatgtaagatggaggtaattgttcctgcctcacaggagctgttgtgaggattaaacagagagtatgtctttagcgcggtgcctggcaccagtgcctggcatgtagtaggggcacaacaaatataaggtccactttgcttttcttttttctatagagaatcctttcctgtttgcattggaagccgtggttatctctgttggctccatgggattgattatcagccttctctgtgtgtatttctggctggaacggtgagatttggagaagcccagaaaaatgaggggaacggtagctgacaatagcagaggagggttttgcagggtctttaggagtaaaggatgagacagtaagtaatgagagattacccaagagggtttggtgatggaaggaagccacaggcacagagaacacagaatcactttatttcatatgggacaactgggagaagggtgataaaaaagctttaacctatgtgctcctgctccctctttctcccctgtcaggacgatgccccgaattcccaccctgaagaacctagaggatcttgttactgaataccacgggaacttttcggtgagaacgctgtcataagcatgctgcagtctatcaactgccaactgcctgccagcaagacagacagagtgtgggggtgggggcagagaggagagggaaggaggccctgcactaactgtcaggatgtggccgaccaaatggggcatggactatacagagagagacacacacagaagtgcagattatagattgaatgaggcagatggcaactggtattgggggcccaggagcctgtgtatcccttctgtaatcaattacagtggttgcagacatcatgagtactcctttggcacagagctcggtcttttacttcctgcccctaattgacccctgacctggacatatctgtctttaggcctggagtggtgtgtctaagggactggctgagagtctgcagccagactacagtgaacgactctgcctcgtcagtgagattcccccaaaaggaggggcccttggggaggggcctggggcctccccatgcaaccagcatagcccctactgggcccccccatgttacaccctaaagcctgaaacctgaaccccaatcctctgacagaagaaccccagggtcctgtagccctaagtggtactaactttccttcattcaacccacctgcgtctcatactcacctcaccccactgtggctgatttggaattttgtgcccccatgtaagcaccccttcatttggcattccccacttgagaattacccttttgccccgaacatgtttttcttctccctcagtctggcccttccttttcgcaggattcttcctccctccctctttccctcccttcctctttccatctaccctccgattgttcctgaaccgatgagaaataaagtttctgttgataatcatcaaaaatgtctgtcatgggggtggggagcaggggaagcctgggatgcaatgagggtgggaggggaagaaaaaggagtagtacattcatgctgtggaggcatctaaaaaaataaaaaaaataaaaaaagcattattgactgatgcatgtaacctttttttttttttttttttttttcttaagtgtatgtaaacttccgacttcaactatatagctg

SEQ ID NO: 318 - DNA, 251 bp, unidentified
  source 1..251: mol_type = other DNA
tagttgaagtcggaagtttacatacacttaaggtagtgtatttttttttttttttttatcatccttaagtgtatgtaaacttccgacttcaactattttttttttttttttttttttgcgaccttttttttttttttttgctagaaagagtactgttctggaaactgacttttttttttttttttggtcgctttttttttttttgatacattttagttgaagtcggaagtttacatacacttaaggatgat

SEQ ID NO: 319 - DNA, 253 bp, unidentified
  source 1..253: mol_type = other DNA
cacgtgcttaagtgtatgtaaacttccgacttcaactatttctcgatcattattattttttgcgaccttttttttttttttttgttgagaatggtgctagtggtagtgaacagtttttttttttttttggtcgcttttttttttttttttttttttagttgaagtcggaagtttacatacacttaagcacgtgttttttttttttttttttttgacgaatacttaagtgtatgtaaacttccgacttcaacta

SEQ ID NO: 320 - DNA, 4721 bp, unidentified; identical to SEQ ID NO: 308
  source 1..4721: mol_type = other DNA

SEQ ID NO: 321 - DNA, 254 bp, unidentified
  source 1..254: mol_type = other DNA
cacgtgcttaagtgtatgtaaacttccgacttcaactatttctcgatcattattattttttgcgaccttttttttttttttttagcaaattggtaatactcctgcctccacagttttttttttttttttggtcgcttttttttttttttttttttttagttgaagtcggaagtttacatacacttaagcacgtgttttttttttttttttttttcagctatacttaagtgtatgtaaacttccgacttcaacta

SEQ ID NO: 322 - DNA, 251 bp, unidentified
  source 1..251: mol_type = other DNA
tagttgaagtcggaagtttacatacacttaagagtatgaatttttttttttttttttatcatccttaagtgtatgtaaacttccgacttcaactattttttttttttttttttttttgcgaccttttttttttttttttccttctcctctaaatcattaccttctataattttttttttttttttggtcgctttttttttttttgatacattttagttgaagtcggaagtttacatacacttaaggatgat

SEQ ID NO: 323 - DNA, 4720 bp, unidentified; identical to SEQ ID NO: 311
  source 1..4720: mol_type = other DNA

SEQ ID NO: 324 - DNA, 251 bp, unidentified
  source 1..251: mol_type = other DNA
cttaagtgtatgtaaacttccgacttcaactagtagtgtatttttttttttttttttatcatctagttgaagtcggaagtttacatacacttaagttttttttttttttttttttttgcgaccttttttttttttttttgctagaaagagtactgttctggaaactgacttttttttttttttttggtcgctttttttttttttgatacatttcttaagtgtatgtaaacttccgacttcaactagatgat

SEQ ID NO: 325 - DNA, 254 bp, unidentified
  source 1..254: mol_type = other DNA
cacgtgtagttgaagtcggaagtttacatacacttaagtttctcgatcattattattttttgcgaccttttttttttttttttgttgagaatggtgctagtggtagtgaacagttttttttttttttttggtcgctttttttttttttttttttttcttaagtgtatgtaaacttccgacttcaactacacgtgttttttttttttttttttttgacgaatatagttgaagtcggaagtttacatacacttaag

SEQ ID NO: 326 - DNA, 4721 bp, unidentified; identical to SEQ ID NO: 314
  source 1..4721: mol_type = other DNA

SEQ ID NO: 327 - DNA, 254 bp, unidentified
  source 1..254: mol_type = other DNA
cacgtgtagttgaagtcggaagtttacatacacttaagtttctcgatcattattattttttgcgaccttttttttttttttttagcaaattggtaatactcctgcctccacagttttttttttttttttggtcgctttttttttttttttttttttcttaagtgtatgtaaacttccgacttcaactacacgtgttttttttttttttttttttcagctatatagttgaagtcggaagtttacatacacttaag

SEQ ID NO: 328 - DNA, 251 bp, unidentified
  source 1..251: mol_type = other DNA
cttaagtgtatgtaaacttccgacttcaactaagtatgaatttttttttttttttttatcatctagttgaagtcggaagtttacatacacttaagttttttttttttttttttttttgcgaccttttttttttttttttccttctcctctaaatcattaccttctataattttttttttttttttggtcgctttttttttttttgatacatttcttaagtgtatgtaaacttccgacttcaactagatgat

SEQ ID NO: 329 - DNA, 4720 bp, unidentified; identical to SEQ ID NO: 317
  source 1..4720: mol_type = other DNA

SEQ ID NO: 330 - DNA, 263 bp, unidentified
  source 1..263: mol_type = other DNA
tagttgaagtcggaagtttacatacacttaaggtagtgtatttttttttttttttttatcatccttaagtgtatgtaaacttccgacttcaactattttttttttttttttttttttgcggcgatcggcttttttttttttttttgctagaaagagtactgttctggaaactgacttttttttttttttttgccgatcgccgctttttttttttttgatacattttagttgaagtcggaagtttacatacacttaaggatgat

SEQ ID NO: 331 - DNA, 266 bp, unidentified
  source 1..266: mol_type = other DNA
cacgtgcttaagtgtatgtaaacttccgacttcaactatttctcgatcattattattttttgcggcgatcggcttttttttttttttttgttgagaatggtgctagtggtagtgaacagttttttttttttttttgccgatcgccgcttttttttttttttttttttttagttgaagtcggaagtttacatacacttaagcacgtgttttttttttttttttttttgacgaatacttaagtgtatgtaaacttccgacttcaacta

SEQ ID NO: 332 - DNA, 4721 bp, unidentified; identical to SEQ ID NO: 308
  source 1..4721: mol_type = other DNA

SEQ ID NO: 333 - DNA, 266 bp, unidentified
  source 1..266: mol_type = other DNA
cacgtgcttaagtgtatgtaaacttccgacttcaactatttctcgatcattattattttttgcggcgatcggcttttttttttttttttagcaaattggtaatactcctgcctccacagttttttttttttttttgccgatcgccgcttttttttttttttttttttttagttgaagtcggaagtttacatacacttaagcacgtgttttttttttttttttttttcagctatacttaagtgtatgtaaacttccgacttcaacta

SEQ ID NO: 334 - DNA, 263 bp, unidentified
  source 1..263: mol_type = other DNA
tagttgaagtcggaagtttacatacacttaagagtatgaatttttttttttttttttatcatccttaagtgtatgtaaacttccgacttcaactattttttttttttttttttttttgcggcgatcggcttttttttttttttttccttctcctctaaatcattaccttctataattttttttttttttttgccgatcgccgctttttttttttttgatacattttagttgaagtcggaagtttacatacacttaaggatgat

SEQ ID NO: 335 - DNA, 4720 bp, unidentified; identical to SEQ ID NO: 311
  source 1..4720: mol_type = other DNA

SEQ ID NO: 336 - DNA, 263 bp, unidentified
  source 1..263: mol_type = other DNA
cttaagtgtatgtaaacttccgacttcaactagtagtgtatttttttttttttttttatcatctagttgaagtcggaagtttacatacacttaagttttttttttttttttttttttgcggcgatcggcttttttttttttttttgctagaaagagtactgttctggaaactgacttttttttttttttttgccgatcgccgctttttttttttttgatacatttcttaagtgtatgtaaacttccgacttcaactagatgat

SEQ ID NO: 337 - DNA, 266 bp, unidentified
  source 1..266: mol_type = other DNA
cacgtgtagttgaagtcggaagtttacatacacttaagtttctcgatcattattattttttgcggcgatcggcttttttttttttttttgttgagaatggtgctagtggtagtgaacagttttttttttttttttgccgatcgccgctttttttttttttttttttttcttaagtgtatgtaaacttccgacttcaactacacgtgttttttttttttttttttttgacgaatatagttgaagtcggaagtttacatacacttaag

SEQ ID NO: 338 - DNA, 4721 bp, unidentified; identical to SEQ ID NO: 314
  source 1..4721: mol_type = other DNA

SEQ ID NO: 339 - DNA, 266 bp, unidentified
  source 1..266: mol_type = other DNA
cacgtgtagttgaagtcggaagtttacatacacttaagtttctcgatcattattattttttgcggcgatcggcttttttttttttttttagcaaattggtaatactcctgcctccacagttttttttttttttttgccgatcgccgctttttttttttttttttttttcttaagtgtatgtaaacttccgacttcaactacacgtgttttttttttttttttttttcagctatatagttgaagtcggaagtttacatacacttaag

SEQ ID NO: 340 - DNA, 263 bp, unidentified
  source 1..263: mol_type = other DNA
cttaagtgtatgtaaacttccgacttcaactaagtatgaatttttttttttttttttatcatctagttgaagtcggaagtttacatacacttaagttttttttttttttttttttttgcggcgatcggcttttttttttttttttccttctcctctaaatcattaccttctataattttttttttttttttgccgatcgccgctttttttttttttgatacatttcttaagtgtatgtaaacttccgacttcaactagatgat

SEQ ID NO: 341 - DNA, 4720 bp, unidentified; identical to SEQ ID NO: 317
  source 1..4720: mol_type = other DNA

SEQ ID NO: 342 - DNA, 257 bp, unidentified
  source 1..257: mol_type = other DNA
cagttgaagtcggaagtttacatacacttaaggtagtgtatttttttttttttttttatcatccttaagtgtatgtaaacttccgacttcaactgttttttttttttttttttttttggcgatcgcttttttttttttttttgctagaaagagtactgttctggaaactgacttttttttttttttttgcgatcgcctttttttttttttgatacatttcagttgaagtcggaagtttacatacacttaaggatgat

SEQ ID NO: 343 - DNA, 260 bp, unidentified
  source 1..260: mol_type = other DNA
cacgtgcttaagtgtatgtaaacttccgacttcaactgtttctcgatcattattattttttggcgatcgcttttttttttttttttgttgagaatggtgctagtggtagtgaacagttttttttttttttttgcgatcgcctttttttttttttttttttttcagttgaagtcggaagtttacatacacttaagcacgtgttttttttttttttttttttgacgaatacttaagtgtatgtaaacttccgacttcaactg

SEQ ID NO: 344 - DNA, 4721 bp, unidentified
  source 1..4721: mol_type = other DNA
tacactaccttaagtgtatgtaaacttccgacttcaactgttttttttttttttttttttttggttacatgcatcagtcaataatgctttttttattttttttatttttttagatgcctccacagcatgaatgtactactcctttttcttcccctcccaccctcattgcatcccaggcttcccctgctccccacccccatgacagacatttttgatgattatcaacagaaactttatttctcatcggttcaggaacaatcggagggtagatggaaagaggaagggagggaaagagggagggaggaagaatcctgcgaaaaggaagggccagactgagggagaagaaaaacatgttcggggcaaaagggtaattctcaagtggggaatgccaaatgaaggggtgcttacatgggggcacaaaattccaaatcagccacagtggggtgaggtgagtatgagacgcaggtgggttgaatgaaggaaagttagtaccacttagggctacaggaccctggggttcttctgtcagaggattggggttcaggtttcaggctttagggtgtaacatgggggggcccagtaggggctatgctggttgcatggggaggccccaggcccctccccaagggcccctccttttgggggaatctcactgacgaggcagagtcgttcactgtagtctggctgcagactctcagccagtcccttagacacaccactccaggcctaaagacagatatgtccaggtcaggggtcaattaggggcaggaagtaaaagaccgagctctgtgccaaaggagtactcatgatgtctgcaaccactgtaattgattacagaagggatacacaggctcctgggcccccaataccagttgccatctgcctcattcaatctataatctgcacttctgtgtgtgtctctctctgtatagtccatgccccatttggtcggccacatcctgacagttagtgcagggcctccttccctctcctctctgcccccacccccacactctgtctgtcttgctggcaggcagttggcagttgatagactgcagcatgcttatgacagcgttctcaccgaaaagttcccgtggtattcagtaacaagatcctctaggttcttcagggtgggaattcggggcatcgtcctgacaggggagaaagagggagcaggagcacataggttaaagcttttttatcacccttctcccagttgtcccatatgaaataaagtgattctgtgttctctgtgcctgtggcttccttccatcaccaaaccctcttgggtaatctctcattacttactgtctcatcctttactcctaaagaccctgcaaaaccctcctctgctattgtcagctaccgttcccctcatttttctgggcttctccaaatctcaccgttccagccagaaatacacacagagaaggctgataatcaatcccatggagccaacagagataaccacggcttccaatgcaaacaggaaaggattctctatagaaaaaagaaaagcaaagtggaccttatatttgttgtgcccctactacatgccaggcactggtgccaggcaccgcgctaaagacatactctctgtttaatcctcacaacagctcctgtgaggcaggaacaattacctccatcttacatcttaggaaacagaatccaagagtttagggatgtggccaaggccaaagaggtagtatgtggcacagcctagatccagctggttccaaagccatcttcaccttgcaggctctctaggaatgcttcagggaaatcctatacattctatagcccccttgagtacccctcagcctccttctcaatccactcccctactctaacaacacgctaacccaaccctacacagaaaaaccttgatttctagaggttggggttagacagtgtggagagatggggcaccaagtttaggggctttagtgacagggaagtggagcaaaagacagtggtgttagaaaggctggggtgttgggctcatggattgggtcatgtgggcccattttaccttttgaagtattgctcccccagtggattgggtggctccattcactccaatgctgagcacttccacagagtgggttaaagcggctccgaacacgaaacgtgtagcgtttctgcccatccacactaggcaaggagaacttatgtctataatccactgattgttccttgaggagaaagaggatgagggaaagtgggtgtctatgagagaagggagaattaaaacatactcctgaacacccaccagtgtcatctctgctactgcccagtttctctctcatctcttgactactcaagccacactgctcccttcactgacttgaatctaatgcctcccctctggatccccttaatggcttccttttgtttacttgtctatctggtatcaggaagagtatgggtagggaatccctaatgaaaactcactggtgtcaggaatggtggctcacgcctgtaatcccagcactttgggaggccgaggtgggcagatcacctgaggtcaggagttcaagaccagcctgaccaacatggcaaaaccctgtctttactaaaaatacaaaaattagccaggcatggttgtgcatgctcccagctacttgggaggctgaagcaggagaatcacttgaaccagggagacagaggtcgcagtgagcccaagatcgccccactgcactcaagcctgggcaacagagtgaggctctgtctcaaaaaaaaaaaaaaaagaaagaaagaaagaaaagaaaagaaaaaaagaaaactcactggagaaaataggggggaaaggagttggaggagggagggtagggggtgagcagagaagctgggaggcagagaacaggagcttgatattaggtccttctatctgtctggttgaatcctttagccctactttcttggccttagctgctacattcacgtccctagtcactcacagtccagctgtggtcccagtcagtccggtactgcaccaagtgctccaaacagtggttcaagaatctgttgttccagttcagttctagctgggattcactcagtttgtgaagtgttaggttctctggagcccaggggatcactggagatatgtgtgcatatgtggtcattcccctggcctagacaagtcaggatcctgaaggtagtgcccctaatacctcctcccttcccatcatgatcccctacctcctcttttctgcccatgtacccttatgataaaagaacactactctgtagactccaatgtcccacagtatccctggtctcttgaccctttctttccaaattacccagattctgcagttttagcatctgtgtggcctgtctcctgggttcccgtgggtcctggagctgaacaacaaatgtttggtagaggtggatctcctttttttgcaactgacagccagaagtgatttcttcagagaatagatagtggctgcacttctggactttatcattatccgagttcttgtacctagaggagaaaggttggaaggaagaggaacagtggggccaatctgggtactgcagatatccagagcctagcctcatctcccctcaaccgacttatgacttaccccaggagaaaacagtggggtacctgggagacttgctaccctctctcttggtctctgatccaacccacctcttcttcatcccctccccctcgtcccttctcataccaataatgcagagtgaggttggtaggctggggctcagagctgctgttccaagtgcaattcatgtactcgacattgaacacaaaacactgaacctctgggaggggcagagtggaaacactgagggagtcagtgggcatagtggtcaggaagaaatctagattggggagaaaatgaaggcagggagggaaagagaaatgatggtcagaaggaggaggccaagcacggtggctcatgtctgtaatcctggtgctttgaaaggctgaggcaggaggatcactagaggccaggagtttgagaccagcctaggcaacatagtgagaccctgcctcaaaagaaagaaagaaacaaacaaacaagaaagaaagaaagaagaagtagcgtgaggcagggaaccctcccccttgcccttcccactccacttttcaattctgcccacatgattgtaatggccagtggcaggcaccagatctctgtacggccccttcccacagccacccttctcaccagccccctccagtcccagatttcccaccagctgtggtgtcttcattcccattgggcgtcagaattgtcgtgttcagccccactcccagcaggggcagctgcaggaataagagggatgtgaatggtaatgatggcttcaacatggcgcttgctcttcattccctgggtgtagtctgtctgtgtcaggaacctgggtccctcacccactacccctccccacccacacgtttcctctgtcatagcttccggtggaaagaaccttataaaccagggctttacagagggtgtggcaaatatgtgctgtgtgacacgggctaagtcctctaggagattaggtgctgctgtaaggtggtaaacagaaactaaagctggatatacaatagtgtcacagactcaaaaatcctcagcccacctagatcctgggaaggatctgttcactgcggccgcatgttctttttttttttttttttttttttcagttgaagtcggaagtttacatacacttaagtattcgtc

SEQ ID NO: 345 - DNA, 260 bp, unidentified
  source 1..260: mol_type = other DNA
cacgtgcttaagtgtatgtaaacttccgacttcaactgtttctcgatcattattattttttggcgatcgcttttttttttttttttagcaaattggtaatactcctgcctccacagttttttttttttttttgcgatcgcctttttttttttttttttttttcagttgaagtcggaagtttacatacacttaagcacgtgttttttttttttttttttttcagctatacttaagtgtatgtaaacttccgacttcaactg

SEQ ID NO: 346 - DNA, 257 bp, unidentified
  source 1..257: mol_type = other DNA
cagttgaagtcggaagtttacatacacttaagagtatgaatttttttttttttttttatcatccttaagtgtatgtaaacttccgacttcaactgttttttttttttttttttttttggcgatcgcttttttttttttttttccttctcctctaaatcattaccttctataattttttttttttttttgcgatcgcctttttttttttttgatacatttcagttgaagtcggaagtttacatacacttaaggatgat

SEQ ID NO: 347 - DNA, 4720 bp, unidentified
  source 1..4720: mol_type = other DNA
ttcatactcttaagtgtatgtaaacttccgacttcaactgttttttttttttttttttttttgaacatgcggccgcgtgaacagatccttcccaggatctaggtgggctgaggatttttgagtctgtgacactattgtatatccagctttagtttctgtttaccaccttacagcagcacctaatctcctagaggacttagcccgtgtcacacagcacatatttgccacaccctctgtaaagccctggtttataaggttctttccaccggaagctatgacagaggaaacgtgtgggtggggaggggtagtgggtgagggacccaggttcctgacacagacagactacacccagggaatgaagagcaagcgccatgttgaagccatcattaccattcacatccctcttattcctgcagctgcccctgctgggagtggggctgaacacgacaattctgacgcccaatgggaatgaagacaccacagctggtgggaaatctgggactggagggggctggtgagaagggtggctgtgggaaggggccgtacagagatctggtgcctgccactggccattacaatcatgtgggcagaattgaaaagtggagtgggaagggcaagggggagggttccctgcctcacgctacttcttctttctttctttcttgtttgtttgtttctttctttcttttgaggcagggtctcactatgttgcctaggctggtctcaaactcctggcctctagtgatcctcctgcctcagcctttcaaagcaccaggattacagacatgagccaccgtgcttggcctcctccttctgaccatcatttctctttccctccctgccttcattttctccccaatctagatttcttcctgaccactatgcccactgactccctcagtgtttccactctgcccctcccagaggttcagtgttttgtgttcaatgtcgagtacatgaattgcacttggaacagcagctctgagccccagcctaccaacctcactctgcattattggtatgagaagggacgagggggaggggatgaagaagaggtgggttggatcagagaccaagagagagggtagcaagtctcccaggtaccccactgttttctcctggggtaagtcataagtcggttgaggggagatgaggctaggctctggatatctgcagtacccagattggccccactgttcctcttccttccaacctttctcctctaggtacaagaactcggataatgataaagtccagaagtgcagccactatctattctctgaagaaatcacttctggctgtcagttgcaaaaaaaggagatccacctctaccaaacatttgttgttcagctccaggacccacgggaacccaggagacaggccacacagatgctaaaactgcagaatctgggtaatttggaaagaaagggtcaagagaccagggatactgtgggacattggagtctacagagtagtgttcttttatcataagggtacatgggcagaaaagaggaggtaggggatcatgatgggaagggaggaggtattaggggcactaccttcaggatcctgacttgtctaggccaggggaatgaccacatatgcacacatatctccagtgatcccctgggctccagagaacctaacacttcacaaactgagtgaatcccagctagaactgaactggaacaacagattcttgaaccactgtttggagcacttggtgcagtaccggactgactgggaccacagctggactgtgagtgactagggacgtgaatgtagcagctaaggccaagaaagtagggctaaaggattcaaccagacagatagaaggacctaatatcaagctcctgttctctgcctcccagcttctctgctcaccccctaccctccctcctccaactcctttcccccctattttctccagtgagttttctttttttcttttcttttctttctttctttcttttttttttttttttgagacagagcctcactctgttgcccaggcttgagtgcagtggggcgatcttgggctcactgcgacctctgtctccctggttcaagtgattctcctgcttcagcctcccaagtagctgggagcatgcacaaccatgcctggctaatttttgtatttttagtaaagacagggttttgccatgttggtcaggctggtcttgaactcctgacctcaggtgatctgcccacctcggcctcccaaagtgctgggattacaggcgtgagccaccattcctgacaccagtgagttttcattagggattccctacccatactcttcctgataccagatagacaagtaaacaaaaggaagccattaaggggatccagaggggaggcattagattcaagtcagtgaagggagcagtgtggcttgagtagtcaagagatgagagagaaactgggcagtagcagagatgacactggtgggtgttcaggagtatgttttaattctcccttctctcatagacacccactttccctcatcctctttctcctcaaggaacaatcagtggattatagacataagttctccttgcctagtgtggatgggcagaaacgctacacgtttcgtgttcggagccgctttaacccactctgtggaagtgctcagcattggagtgaatggagccacccaatccactgggggagcaatacttcaaaaggtaaaatgggcccacatgacccaatccatgagcccaacaccccagcctttctaacaccactgtcttttgctccacttccctgtcactaaagcccctaaacttggtgccccatctctccacactgtctaaccccaacctctagaaatcaaggtttttctgtgtagggttgggttagcgtgttgttagagtaggggagtggattgagaaggaggctgaggggtactcaagggggctatagaatgtataggatttccctgaagcattcctagagagcctgcaaggtgaagatggctttggaaccagctggatctaggctgtgccacatactacctctttggccttggccacatccctaaactcttggattctgtttcctaagatgtaagatggaggtaattgttcctgcctcacaggagctgttgtgaggattaaacagagagtatgtctttagcgcggtgcctggcaccagtgcctggcatgtagtaggggcacaacaaatataaggtccactttgcttttcttttttctatagagaatcctttcctgtttgcattggaagccgtggttatctctgttggctccatgggattgattatcagccttctctgtgtgtatttctggctggaacggtgagatttggagaagcccagaaaaatgaggggaacggtagctgacaatagcagaggagggttttgcagggtctttaggagtaaaggatgagacagtaagtaatgagagattacccaagagggtttggtgatggaaggaagccacaggcacagagaacacagaatcactttatttcatatgggacaactgggagaagggtgataaaaaagctttaacctatgtgctcctgctccctctttctcccctgtcaggacgatgccccgaattcccaccctgaagaacctagaggatcttgttactgaataccacgggaacttttcggtgagaacgctgtcataagcatgctgcagtctatcaactgccaactgcctgccagcaagacagacagagtgtgggggtgggggcagagaggagagggaaggaggccctgcactaactgtcaggatgtggccgaccaaatggggcatggactatacagagagagacacacacagaagtgcagattatagattgaatgaggcagatggcaactggtattgggggcccaggagcctgtgtatcccttctgtaatcaattacagtggttgcagacatcatgagtactcctttggcacagagctcggtcttttacttcctgcccctaattgacccctgacctggacatatctgtctttaggcctggagtggtgtgtctaagggactggctgagagtctgcagccagactacagtgaacgactctgcctcgtcagtgagattcccccaaaaggaggggcccttggggaggggcctggggcctccccatgcaaccagcatagcccctactgggcccccccatgttacaccctaaagcctgaaacctgaaccccaatcctctgacagaagaaccccagggtcctgtagccctaagtggtactaactttccttcattcaacccacctgcgtctcatactcacctcaccccactgtggctgatttggaattttgtgcccccatgtaagcaccccttcatttggcattccccacttgagaattacccttttgccccgaacatgtttttcttctccctcagtctggcccttccttttcgcaggattcttcctccctccctctttccctcccttcctctttccatctaccctccgattgttcctgaaccgatgagaaataaagtttctgttgataatcatcaaaaatgtctgtcatgggggtggggagcaggggaagcctgggatgcaatgagggtgggaggggaagaaaaaggagtagtacattcatgctgtggaggcatctaaaaaaataaaaaaaataaaaaaagcattattgactgatgcatgtaacctttttttttttttttttttttttcagttgaagtcggaagtttacatacacttaagtatagctg

SEQ ID NO: 348 - DNA, 257 bp, unidentified
  source 1..257: mol_type = other DNA
cttaagtgtatgtaaacttccgacttcaactggtagtgtatttttttttttttttttatcatccagttgaagtcggaagtttacatacacttaagttttttttttttttttttttttggcgatcgcttttttttttttttttgctagaaagagtactgttctggaaactgacttttttttttttttttgcgatcgcctttttttttttttgatacatttcttaagtgtatgtaaacttccgacttcaactggatgat

SEQ ID NO: 349 - DNA, 260 bp, unidentified
  source 1..260: mol_type = other DNA
cacgtgcagttgaagtcggaagtttacatacacttaagtttctcgatcattattattttttggcgatcgcttttttttttttttttgttgagaatggtgctagtggtagtgaacagttttttttttttttttgcgatcgcctttttttttttttttttttttcttaagtgtatgtaaacttccgacttcaactgcacgtgttttttttttttttttttttgacgaatacagttgaagtcggaagtttacatacacttaag

SEQ ID NO: 350 - DNA, 4721 bp, unidentified
  source 1..4721: mol_type = other DNA
tacactaccagttgaagtcggaagtttacatacacttaagttttttttttttttttttttttggttacatgcatcagtcaataatgctttttttattttttttatttttttagatgcctccacagcatgaatgtactactcctttttcttcccctcccaccctcattgcatcccaggcttcccctgctccccacccccatgacagacatttttgatgattatcaacagaaactttatttctcatcggttcaggaacaatcggagggtagatggaaagaggaagggagggaaagagggagggaggaagaatcctgcgaaaaggaagggccagactgagggagaagaaaaacatgttcggggcaaaagggtaattctcaagtggggaatgccaaatgaaggggtgcttacatgggggcacaaaattccaaatcagccacagtggggtgaggtgagtatgagacgcaggtgggttgaatgaaggaaagttagtaccacttagggctacaggaccctggggttcttctgtcagaggattggggttcaggtttcaggctttagggtgtaacatgggggggcccagtaggggctatgctggttgcatggggaggccccaggcccctccccaagggcccctccttttgggggaatctcactgacgaggcagagtcgttcactgtagtctggctgcagactctcagccagtcccttagacacaccactccaggcctaaagacagatatgtccaggtcaggggtcaattaggggcaggaagtaaaagaccgagctctgtgccaaaggagtactcatgatgtctgcaaccactgtaattgattacagaagggatacacaggctcctgggcccccaataccagttgccatctgcctcattcaatctataatctgcacttctgtgtgtgtctctctctgtatagtccatgccccatttggtcggccacatcctgacagttagtgcagggcctccttccctctcctctctgcccccacccccacactctgtctgtcttgctggcaggcagttggcagttgatagactgcagcatgcttatgacagcgttctcaccgaaaagttcccgtggtattcagtaacaagatcctctaggttcttcagggtgggaattcggggcatcgtcctgacaggggagaaagagggagcaggagcacataggttaaagcttttttatcacccttctcccagttgtcccatatgaaataaagtgattctgtgttctctgtgcctgtggcttccttccatcaccaaaccctcttgggtaatctctcattacttactgtctcatcctttactcctaaagaccctgcaaaaccctcctctgctattgtcagctaccgttcccctcatttttctgggcttctccaaatctcaccgttccagccagaaatacacacagagaaggctgataatcaatcccatggagccaacagagataaccacggcttccaatgcaaacaggaaaggattctctatagaaaaaagaaaagcaaagtggaccttatatttgttgtgcccctactacatgccaggcactggtgccaggcaccgcgctaaagacatactctctgtttaatcctcacaacagctcctgtgaggcaggaacaattacctccatcttacatcttaggaaacagaatccaagagtttagggatgtggccaaggccaaagaggtagtatgtggcacagcctagatccagctggttccaaagccatcttcaccttgcaggctctctaggaatgcttcagggaaatcctatacattctatagcccccttgagtacccctcagcctccttctcaatccactcccctactctaacaacacgctaacccaaccctacacagaaaaaccttgatttctagaggttggggttagacagtgtggagagatggggcaccaagtttaggggctttagtgacagggaagtggagcaaaagacagtggtgttagaaaggctggggtgttgggctcatggattgggtcatgtgggcccattttaccttttgaagtattgctcccccagtggattgggtggctccattcactccaatgctgagcacttccacagagtgggttaaagcggctccgaacacgaaacgtgtagcgtttctgcccatccacactaggcaaggagaacttatgtctataatccactgattgttccttgaggagaaagaggatgagggaaagtgggtgtctatgagagaagggagaattaaaacatactcctgaacacccaccagtgtcatctctgctactgcccagtttctctctcatctcttgactactcaagccacactgctcccttcactgacttgaatctaatgcctcccctctggatccccttaatggcttccttttgtttacttgtctatctggtatcaggaagagtatgggtagggaatccctaatgaaaactcactggtgtcaggaatggtggctcacgcctgtaatcccagcactttgggaggccgaggtgggcagatcacctgaggtcaggagttcaagaccagcctgaccaacatggcaaaaccctgtctttactaaaaatacaaaaattagccaggcatggttgtgcatgctcccagctacttgggaggctgaagcaggagaatcacttgaaccagggagacagaggtcgcagtgagcccaagatcgccccactgcactcaagcctgggcaacagagtgaggctctgtctcaaaaaaaaaaaaaaaagaaagaaagaaagaaaagaaaagaaaaaaagaaaactcactggagaaaataggggggaaaggagttggaggagggagggtagggggtgagcagagaagctgggaggcagagaacaggagcttgatattaggtccttctatctgtctggttgaatcctttagccctactttcttggccttagctgctacattcacgtccctagtcactcacagtccagctgtggtcccagtcagtccggtactgcaccaagtgctccaaacagtggttcaagaatctgttgttccagttcagttctagctgggattcactcagtttgtgaagtgttaggttctctggagcccaggggatcactggagatatgtgtgcatatgtggtcattcccctggcctagacaagtcaggatcctgaaggtagtgcccctaatacctcctcccttcccatcatgatcccctacctcctcttttctgcccatgtacccttatgataaaagaacactactctgtagactccaatgtcccacagtatccctggtctcttgaccctttctttccaaattacccagattctgcagttttagcatctgtgtggcctgtctcctgggttcccgtgggtcctggagctgaacaacaaatgtttggtagaggtggatctcctttttttgcaactgacagccagaagtgatttcttcagagaatagatagtggctgcacttctggactttatcattatccgagttcttgtacctagaggagaaaggttggaaggaagaggaacagtggggccaatctgggtactgcagatatccagagcctagcctcatctcccctcaaccgacttatgacttaccccaggagaaaacagtggggtacctgggagacttgctaccctctctcttggtctctgatccaacccacctcttcttcatcccctccccctcgtcccttctcataccaataatgcagagtgaggttggtaggctggggctcagagctgctgttccaagtgcaattcatgtactcgacattgaacacaaaacactgaacctctgggaggggcagagtggaaacactgagggagtcagtgggcatagtggtcaggaagaaatctagattggggagaaaatgaaggcagggagggaaagagaaatgatggtcagaaggaggaggccaagcacggtggctcatgtctgtaatcctggtgctttgaaaggctgaggcaggaggatcactagaggccaggagtttgagaccagcctaggcaacatagtgagaccctgcctcaaaagaaagaaagaaacaaacaaacaagaaagaaagaaagaagaagtagcgtgaggcagggaaccctcccccttgcccttcccactccacttttcaattctgcccacatgattgtaatggccagtggcaggcaccagatctctgtacggccccttcccacagccacccttctcaccagccccctccagtcccagatttcccaccagctgtggtgtcttcattcccattgggcgtcagaattgtcgtgttcagccccactcccagcaggggcagctgcaggaataagagggatgtgaatggtaatgatggcttcaacatggcgcttgctcttcattccctgggtgtagtctgtctgtgtcaggaacctgggtccctcacccactacccctccccacccacacgtttcctctgtcatagcttccggtggaaagaaccttataaaccagggctttacagagggtgtggcaaatatgtgctgtgtgacacgggctaagtcctctaggagattaggtgctgctgtaaggtggtaaacagaaactaaagctggatatacaatagtgtcacagactcaaaaatcctcagcccacctagatcctgggaaggatctgttcactgcggccgcatgttctttttttttttttttttttttttcttaagtgtatgtaaacttccgacttcaactgtattcgtc

SEQ ID NO: 351 - DNA, 260 bp, unidentified
  source 1..260: mol_type = other DNA
cacgtgcagttgaagtcggaagtttacatacacttaagtttctcgatcattattattttttggcgatcgcttttttttttttttttagcaaattggtaatactcctgcctccacagttttttttttttttttgcgatcgcctttttttttttttttttttttcttaagtgtatgtaaacttccgacttcaactgcacgtgttttttttttttttttttttcagctatacagttgaagtcggaagtttacatacacttaag

SEQ ID NO: 352 - DNA, 257 bp, unidentified
  source 1..257: mol_type = other DNA
cttaagtgtatgtaaacttccgacttcaactgagtatgaatttttttttttttttttatcatccagttgaagtcggaagtttacatacacttaagttttttttttttttttttttttggcgatcgcttttttttttttttttccttctcctctaaatcattaccttctataattttttttttttttttgcgatcgcctttttttttttttgatacatttcttaagtgtatgtaaacttccgacttcaactggatgat

SEQ ID NO: 353 - DNA, 4720 bp, unidentified
  source 1..4720: mol_type = other DNA
ttcatactcagttgaagtcggaagtttacatacacttaagttttttttttttttttttttttgaacatgcggccgcgtgaacagatccttcccaggatctaggtgggctgaggatttttgagtctgtgacactattgtatatccagctttagtttctgtttaccaccttacagcagcacctaatctcctagaggacttagcccgtgtcacacagcacatatttgccacaccctctgtaaagccctggtttataaggttctttccaccggaagctatgacagaggaaacgtgtgggtggggaggggtagtgggtgagggacccaggttcctgacacagacagactacacccagggaatgaagagcaagcgccatgttgaagccatcattaccattcacatccctcttattcctgcagctgcccctgctgggagtggggctgaacacgacaattctgacgcccaatgggaatgaagacaccacagctggtgggaaatctgggactggagggggctggtgagaagggtggctgtgggaaggggccgtacagagatctggtgcctgccactggccattacaatcatgtgggcagaattgaaaagtggagtgggaagggcaagggggagggttccctgcctcacgctacttcttctttctttctttcttgtttgtttgtttctttctttcttttgaggcagggtctcactatgttgcctaggctggtctcaaactcctggcctctagtgatcctcctgcctcagcctttcaaagcaccaggattacagacatgagccaccgtgcttggcctcctccttctgaccatcatttctctttccctccctgccttcattttctccccaatctagatttcttcctgaccactatgcccactgactccctcagtgtttccactctgcccctcccagaggttcagtgttttgtgttcaatgtcgagtacatgaattgcacttggaacagcagctctgagccccagcctaccaacctcactctgcattattggtatgagaagggacgagggggaggggatgaagaagaggtgggttggatcagagaccaagagagagggtagcaagtctcccaggtaccccactgttttctcctggggtaagtcataagtcggttgaggggagatgaggctaggctctggatatctgcagtacccagattggccccactgttcctcttccttccaacctttctcctctaggtacaagaactcggataatgataaagtccagaagtgcagccactatctattctctgaagaaatcacttctggctgtcagttgcaaaaaaaggagatccacctctaccaaacatttgttgttcagctccaggacccacgggaacccaggagacaggccacacagatgctaaaactgcagaatctgggtaatttggaaagaaagggtcaagagaccagggatactgtgggacattggagtctacagagtagtgttcttttatcataagggtacatgggcagaaaagaggaggtaggggatcatgatgggaagggaggaggtattaggggcactaccttcaggatcctgacttgtctaggccaggggaatgaccacatatgcacacatatctccagtgatcccctgggctccagagaacctaacacttcacaaactgagtgaatcccagctagaactgaactggaacaacagattcttgaaccactgtttggagcacttggtgcagtaccggactgactgggaccacagctggactgtgagtgactagggacgtgaatgtagcagctaaggccaagaaagtagggctaaaggattcaaccagacagatagaaggacctaatatcaagctcctgttctctgcctcccagcttctctgctcaccccctaccctccctcctccaactcctttcccccctattttctccagtgagttttctttttttcttttcttttctttctttctttcttttttttttttttttgagacagagcctcactctgttgcccaggcttgagtgcagtggggcgatcttgggctcactgcgacctctgtctccctggttcaagtgattctcctgcttcagcctcccaagtagctgggagcatgcacaaccatgcctggctaatttttgtatttttagtaaagacagggttttgccatgttggtcaggctggtcttgaactcctgacctcaggtgatctgcccacctcggcctcccaaagtgctgggattacaggcgtgagccaccattcctgacaccagtgagttttcattagggattccctacccatactcttcctgataccagatagacaagtaaacaaaaggaagccattaaggggatccagaggggaggcattagattcaagtcagtgaagggagcagtgtggcttgagtagtcaagagatgagagagaaactgggcagtagcagagatgacactggtgggtgttcaggagtatgttttaattctcccttctctcatagacacccactttccctcatcctctttctcctcaaggaacaatcagtggattatagacataagttctccttgcctagtgtggatgggcagaaacgctacacgtttcgtgttcggagccgctttaacccactctgtggaagtgctcagcattggagtgaatggagccacccaatccactgggggagcaatacttcaaaaggtaaaatgggcccacatgacccaatccatgagcccaacaccccagcctttctaacaccactgtcttttgctccacttccctgtcactaaagcccctaaacttggtgccccatctctccacactgtctaaccccaacctctagaaatcaaggtttttctgtgtagggttgggttagcgtgttgttagagtaggggagtggattgagaaggaggctgaggggtactcaagggggctatagaatgtataggatttccctgaagcattcctagagagcctgcaaggtgaagatggctttggaaccagctggatctaggctgtgccacatactacctctttggccttggccacatccctaaactcttggattctgtttcctaagatgtaagatggaggtaattgttcctgcctcacaggagctgttgtgaggattaaacagagagtatgtctttagcgcggtgcctggcaccagtgcctggcatgtagtaggggcacaacaaatataaggtccactttgcttttcttttttctatagagaatcctttcctgtttgcattggaagccgtggttatctctgttggctccatgggattgattatcagccttctctgtgtgtatttctggctggaacggtgagatttggagaagcccagaaaaatgaggggaacggtagctgacaatagcagaggagggttttgcagggtctttaggagtaaaggatgagacagtaagtaatgagagattacccaagagggtttggtgatggaaggaagccacaggcacagagaacacagaatcactttatttcatatgggacaactgggagaagggtgataaaaaagctttaacctatgtgctcctgctccctctttctcccctgtcaggacgatgccccgaattcccaccctgaagaacctagaggatcttgttactgaataccacgggaacttttcggtgagaacgctgtcataagcatgctgcagtctatcaactgccaactgcctgccagcaagacagacagagtgtgggggtgggggcagagaggagagggaaggaggccctgcactaactgtcaggatgtggccgaccaaatggggcatggactatacagagagagacacacacagaagtgcagattatagattgaatgaggcagatggcaactggtattgggggcccaggagcctgtgtatcccttctgtaatcaattacagtggttgcagacatcatgagtactcctttggcacagagctcggtcttttacttcctgcccctaattgacccctgacctggacatatctgtctttaggcctggagtggtgtgtctaagggactggctgagagtctgcagccagactacagtgaacgactctgcctcgtcagtgagattcccccaaaaggaggggcccttggggaggggcctggggcctccccatgcaaccagcatagcccctactgggcccccccatgttacaccctaaagcctgaaacctgaaccccaatcctctgacagaagaaccccagggtcctgtagccctaagtggtactaactttccttcattcaacccacctgcgtctcatactcacctcaccccactgtggctgatttggaattttgtgcccccatgtaagcaccccttcatttggcattccccacttgagaattacccttttgccccgaacatgtttttcttctccctcagtctggcccttccttttcgcaggattcttcctccctccctctttccctcccttcctctttccatctaccctccgattgttcctgaaccgatgagaaataaagtttctgttgataatcatcaaaaatgtctgtcatgggggtggggagcaggggaagcctgggatgcaatgagggtgggaggggaagaaaaaggagtagtacattcatgctgtggaggcatctaaaaaaataaaaaaaataaaaaaagcattattgactgatgcatgtaacctttttttttttttttttttttttcttaagtgtatgtaaacttccgacttcaactgtatagctg

SEQ ID NO: 354 - DNA, 251 bp, unidentified
  source 1..251: mol_type = other DNA
cagttgaagtcggaagtttacatacacttaaggtagtgtatttttttttttttttttatcatccttaagtgtatgtaaacttccgacttcaactgttttttttttttttttttttttgcgaccttttttttttttttttgctagaaagagtactgttctggaaactgacttttttttttttttttggtcgctttttttttttttgatacatttcagttgaagtcggaagtttacatacacttaaggatgat

SEQ ID NO: 355 - DNA, 253 bp, unidentified
  source 1..253: mol_type = other DNA
cacgtgcttaagtgtatgtaaacttccgacttcaactgtttctcgatcattattattttttgcgaccttttttttttttttttgttgagaatggtgctagtggtagtgaacagtttttttttttttttggtcgctttttttttttttttttttttcagttgaagtcggaagtttacatacacttaagcacgtgttttttttttttttttttttgacgaatacttaagtgtatgtaaacttccgacttcaactg

SEQ ID NO: 356 - DNA, 4721 bp, unidentified; identical to SEQ ID NO: 344
  source 1..4721: mol_type = other DNA

SEQ ID NO: 357 - DNA, 254 bp, unidentified
  source 1..254: mol_type = other DNA
cacgtgcttaagtgtatgtaaacttccgacttcaactgtttctcgatcattattattttttgcgaccttttttttttttttttagcaaattggtaatactcctgcctccacagttttttttttttttttggtcgctttttttttttttttttttttcagttgaagtcggaagtttacatacacttaagcacgtgttttttttttttttttttttcagctatacttaagtgtatgtaaacttccgacttcaactg

SEQ ID NO: 358 - DNA, 251 bp, unidentified
  source 1..251: mol_type = other DNA
cagttgaagtcggaagtttacatacacttaagagtatgaatttttttttttttttttatcatccttaagtgtatgtaaacttccgacttcaactgttttttttttttttttttttttgcgaccttttttttttttttttccttctcctctaaatcattaccttctataattttttttttttttttggtcgctttttttttttttgatacatttcagttgaagtcggaagtttacatacacttaaggatgat

SEQ ID NO: 359 - DNA, 4720 bp, unidentified; identical to SEQ ID NO: 347
  source 1..4720: mol_type = other DNA

SEQ ID NO: 360 - DNA, 251 bp, unidentified
  source 1..251: mol_type = other DNA
cttaagtgtatgtaaacttccgacttcaactggtagtgtatttttttttttttttttatcatccagttgaagtcggaagtttacatacacttaagttttttttttttttttttttttgcgaccttttttttttttttttgctagaaagagtactgttctggaaactgacttttttttttttttttggtcgctttttttttttttgatacatttcttaagtgtatgtaaacttccgacttcaactggatgat

SEQ ID NO: 361 - DNA, 254 bp, unidentified
  source 1..254: mol_type = other DNA
cacgtgcagttgaagtcggaagtttacatacacttaagtttctcgatcattattattttttgcgaccttttttttttttttttgttgagaatggtgctagtggtagtgaacagttttttttttttttttggtcgctttttttttttttttttttttcttaagtgtatgtaaacttccgacttcaactgcacgtgttttttttttttttttttttgacgaatacagttgaagtcggaagtttacatacacttaag

SEQ ID NO: 362 - DNA, 4721 bp, unidentified; identical to SEQ ID NO: 350
  source 1..4721: mol_type = other DNA

SEQ ID NO: 363 - DNA, 254 bp, unidentified
  source 1..254: mol_type = other DNA
cacgtgcagttgaagtcggaagtttacatacacttaagtttctcgatcattattattttttgcgaccttttttttttttttttagcaaattggtaatactcctgcctccacagttttttttttttttttggtcgctttttttttttttttttttttcttaagtgtatgtaaacttccgacttcaactgcacgtgttttttttttttttttttttcagctatacagttgaagtcggaagtttacatacacttaag

SEQ ID NO: 364 - DNA, 251 bp, unidentified
  source 1..251: mol_type = other DNA
cttaagtgtatgtaaacttccgacttcaactgagtatgaatttttttttttttttttatcatccagttgaagtcggaagtttacatacacttaagttttttttttttttttttttttgcgaccttttttttttttttttccttctcctctaaatcattaccttctataattttttttttttttttggtcgctttttttttttttgatacatttcttaagtgtatgtaaacttccgacttcaactggatgat

SEQ ID NO: 365 - DNA, 4720 bp, unidentified; identical to SEQ ID NO: 353
  source 1..4720: mol_type = other DNA

SEQ ID NO: 366 - DNA, 263 bp, unidentified
  source 1..263: mol_type = other DNA
cagttgaagtcggaagtttacatacacttaaggtagtgtatttttttttttttttttatcatccttaagtgtatgtaaacttccgacttcaactgttttttttttttttttttttttgcggcgatcggcttttttttttttttttgctagaaagagtactgttctggaaactgacttttttttttttttttgccgatcgccgctttttttttttttgatacatttcagttgaagtcggaagtttacatacacttaaggatgat

SEQ ID NO: 367 - DNA, 266 bp, unidentified
  source 1..266: mol_type = other DNA
cacgtgcttaagtgtatgtaaacttccgacttcaactgtttctcgatcattattattttttgcggcgatcggcttttttttttttttttgttgagaatggtgctagtggtagtgaacagttttttttttttttttgccgatcgccgctttttttttttttttttttttcagttgaagtcggaagtttacatacacttaagcacgtgttttttttttttttttttttgacgaatacttaagtgtatgtaaacttccgacttcaactg

SEQ ID NO: 368 - DNA, 4721 bp, unidentified; identical to SEQ ID NO: 344
  source 1..4721: mol_type = other DNA

SEQ ID NO: 369 - DNA, 266 bp, unidentified
  source 1..266: mol_type = other DNA
cacgtgcttaagtgtatgtaaacttccgacttcaactgtttctcgatcattattattttttgcggcgatcggcttttttttttttttttagcaaattggtaatactcctgcctccacagttttttttttttttttgccgatcgccgctttttttttttttttttttttcagttgaagtcggaagtttacatacacttaagcacgtgttttttttttttttttttttcagctatacttaagtgtatgtaaacttccgacttcaactg

SEQ ID NO: 370 - DNA, 263 bp, unidentified
  source 1..263: mol_type = other DNA
cagttgaagtcggaagtttacatacacttaagagtatgaatttttttttttttttttatcatccttaagtgtatgtaaacttccgacttcaactgttttttttttttttttttttttgcggcgatcggcttttttttttttttttccttctcctctaaatcattaccttctataattttttttttttttttgccgatcgccgctttttttttttttgatacatttcagttgaagtcggaagtttacatacacttaaggatgat

SEQ ID NO: 371 - DNA, 4720 bp, unidentified; identical to SEQ ID NO: 347
  source 1..4720: mol_type = other DNA

SEQ ID NO: 372 - DNA, 263 bp, unidentified
  source 1..263: mol_type = other DNA
cttaagtgtatgtaaacttccgacttcaactggtagtgtatttttttttttttttttatcatccagttgaagtcggaagtttacatacacttaagttttttttttttttttttttttgcggcgatcggcttttttttttttttttgctagaaagagtactgttctggaaactgacttttttttttttttttgccgatcgccgctttttttttttttgatacatttcttaagtgtatgtaaacttccgacttcaactggatgat

SEQ ID NO: 373 - DNA, 266 bp, unidentified
  source 1..266: mol_type = other DNA
cacgtgcagttgaagtcggaagtttacatacacttaagtttctcgatcattattattttttgcggcgatcggcttttttttttttttttgttgagaatggtgctagtggtagtgaacagttttttttttttttttgccgatcgccgctttttttttttttttttttttcttaagtgtatgtaaacttccgacttcaactgcacgtgttttttttttttttttttttgacgaatacagttgaagtcggaagtttacatacacttaag

SEQ ID NO: 374 - DNA, 4721 bp, unidentified; identical to SEQ ID NO: 350
  source 1..4721: mol_type = other DNA

SEQ ID NO: 375 - DNA, 266 bp, unidentified
  source 1..266: mol_type = other DNA
cacgtgcagttgaagtcggaagtttacatacacttaagtttctcgatcattattattttttgcggcgatcggcttttttttttttttttagcaaattggtaatactcctgcctccacagttttttttttttttttgccgatcgccgctttttttttttttttttttttcttaagtgtatgtaaacttccgacttcaactgcacgtgttttttttttttttttttttcagctatacagttgaagtcggaagtttacatacacttaag

SEQ ID NO: 376 - DNA, 263 bp, unidentified
  source 1..263: mol_type = other DNA
cttaagtgtatgtaaacttccgacttcaactgagtatgaatttttttttttttttttatcatccagttgaagtcggaagtttacatacacttaagttttttttttttttttttttttgcggcgatcggcttttttttttttttttccttctcctctaaatcattaccttctataattttttttttttttttgccgatcgccgctttttttttttttgatacatttcttaagtgtatgtaaacttccgacttcaactggatgat

SEQ ID NO: 377 - DNA, 4721 bp, unidentified
  source 1..4721: mol_type = other DNA
ttcatactcttaagtgtatgtaaacttccgacttcaactgttttttttttttttttttttttgaacatgcggccgcagtgaacagatccttcccaggatctaggtgggctgaggatttttgagtctgtgacactattgtatatccagctttagtttctgtttaccaccttacagcagcacctaatctcctagaggacttagcccgtgtcacacagcacatatttgccacaccctctgtaaagccctggtttataaggttctttccaccggaagctatgacagaggaaacgtgtgggtggggaggggtagtgggtgagggacccaggttcctgacacagacagactacacccagggaatgaagagcaagcgccatgttgaagccatcattaccattcacatccctcttattcctgcagctgcccctgctgggagtggggctgaacacgacaattctgacgcccaatgggaatgaagacaccacagctggtgggaaatctgggactggagggggctggtgagaagggtggctgtgggaaggggccgtacagagatctggtgcctgccactggccattacaatcatgtgggcagaattgaaaagtggagtgggaagggcaagggggagggttccctgcctcacgctacttcttctttctttctttcttgtttgtttgtttctttctttcttttgaggcagggtctcactatgttgcctaggctggtctcaaactcctggcctctagtgatcctcctgcctcagcctttcaaagcaccaggattacagacatgagccaccgtgcttggcctcctccttctgaccatcatttctctttccctccctgccttcattttctccccaatctagatttcttcctgaccactatgcccactgactccctcagtgtttccactctgcccctcccagaggttcagtgttttgtgttcaatgtcgagtacatgaattgcacttggaacagcagctctgagccccagcctaccaacctcactctgcattattggtatgagaagggacgagggggaggggatgaagaagaggtgggttggatcagagaccaagagagagggtagcaagtctcccaggtaccccactgttttctcctggggtaagtcataagtcggttgaggggagatgaggctaggctctggatatctgcagtacccagattggccccactgttcctcttccttccaacctttctcctctaggtacaagaactcggataatgataaagtccagaagtgcagccactatctattctctgaagaaatcacttctggctgtcagttgcaaaaaaaggagatccacctctaccaaacatttgttgttcagctccaggacccacgggaacccaggagacaggccacacagatgctaaaactgcagaatctgggtaatttggaaagaaagggtcaagagaccagggatactgtgggacattggagtctacagagtagtgttcttttatcataagggtacatgggcagaaaagaggaggtaggggatcatgatgggaagggaggaggtattaggggcactaccttcaggatcctgacttgtctaggccaggggaatgaccacatatgcacacatatctccagtgatcccctgggctccagagaacctaacacttcacaaactgagtgaatcccagctagaactgaactggaacaacagattcttgaaccactgtttggagcacttggtgcagtaccggactgactgggaccacagctggactgtgagtgactagggacgtgaatgtagcagctaaggccaagaaagtagggctaaaggattcaaccagacagatagaaggacctaatatcaagctcctgttctctgcctcccagcttctctgctcaccccctaccctccctcctccaactcctttcccccctattttctccagtgagttttctttttttcttttcttttctttctttctttcttttttttttttttttgagacagagcctcactctgttgcccaggcttgagtgcagtggggcgatcttgggctcactgcgacctctgtctccctggttcaagtgattctcctgcttcagcctcccaagtagctgggagcatgcacaaccatgcctggctaatttttgtatttttagtaaagacagggttttgccatgttggtcaggctggtcttgaactcctgacctcaggtgatctgcccacctcggcctcccaaagtgctgggattacaggcgtgagccaccattcctgacaccagtgagttttcattagggattccctacccatactcttcctgataccagatagacaagtaaacaaaaggaagccattaaggggatccagaggggaggcattagattcaagtcagtgaagggagcagtgtggcttgagtagtcaagagatgagagagaaactgggcagtagcagagatgacactggtgggtgttcaggagtatgttttaattctcccttctctcatagacacccactttccctcatcctctttctcctcaaggaacaatcagtggattatagacataagttctccttgcctagtgtggatgggcagaaacgctacacgtttcgtgttcggagccgctttaacccactctgtggaagtgctcagcattggagtgaatggagccacccaatccactgggggagcaatacttcaaaaggtaaaatgggcccacatgacccaatccatgagcccaacaccccagcctttctaacaccactgtcttttgctccacttccctgtcactaaagcccctaaacttggtgccccatctctccacactgtctaaccccaacctctagaaatcaaggtttttctgtgtagggttgggttagcgtgttgttagagtaggggagtggattgagaaggaggctgaggggtactcaagggggctatagaatgtataggatttccctgaagcattcctagagagcctgcaaggtgaagatggctttggaaccagctggatctaggctgtgccacatactacctctttggccttggccacatccctaaactcttggattctgtttcctaagatgtaagatggaggtaattgttcctgcctcacaggagctgttgtgaggattaaacagagagtatgtctttagcgcggtgcctggcaccagtgcctggcatgtagtaggggcacaacaaatataaggtccactttgcttttcttttttctatagagaatcctttcctgtttgcattggaagccgtggttatctctgttggctccatgggattgattatcagccttctctgtgtgtatttctggctggaacggtgagatttggagaagcccagaaaaatgaggggaacggtagctgacaatagcagaggagggttttgcagggtctttaggagtaaaggatgagacagtaagtaatgagagattacccaagagggtttggtgatggaaggaagccacaggcacagagaacacagaatcactttatttcatatgggacaactgggagaagggtgataaaaaagctttaacctatgtgctcctgctccctctttctcccctgtcaggacgatgccccgaattcccaccctgaagaacctagaggatcttgttactgaataccacgggaacttttcggtgagaacgctgtcataagcatgctgcagtctatcaactgccaactgcctgccagcaagacagacagagtgtgggggtgggggcagagaggagagggaaggaggccctgcactaactgtcaggatgtggccgaccaaatggggcatggactatacagagagagacacacacagaagtgcagattatagattgaatgaggcagatggcaactggtattgggggcccaggagcctgtgtatcccttctgtaatcaattacagtggttgcagacatcatgagtactcctttggcacagagctcggtcttttacttcctgcccctaattgacccctgacctggacatatctgtctttaggcctggagtggtgtgtctaagggactggctgagagtctgcagccagactacagtgaacgactctgcctcgtcagtgagattcccccaaaaggaggggcccttggggaggggcctggggcctccccatgcaaccagcatagcccctactgggcccccccatgttacaccctaaagcctgaaacctgaaccccaatcctctgacagaagaaccccagggtcctgtagccctaagtggtactaactttccttcattcaacccacctgcgtctcatactcacctcaccccactgtggctgatttggaattttgtgcccccatgtaagcaccccttcatttggcattccccacttgagaattacccttttgccccgaacatgtttttcttctccctcagtctggcccttccttttcgcaggattcttcctccctccctctttccctcccttcctctttccatctaccctccgattgttcctgaaccgatgagaaataaagtttctgttgataatcatcaaaaatgtctgtcatgggggtggggagcaggggaagcctgggatgcaatgagggtgggaggggaagaaaaaggagtagtacattcatgctgtggaggcatctaaaaaaataaaaaaaataaaaaaagcattattgactgatgcatgtaacctttttttttttttttttttttttcagttgaagtcggaagtttacatacacttaagtatagctg

SEQ ID NO: 378 - DNA, 257 bp, unidentified
  source 1..257: mol_type = other DNA
tagttgaagtcggaagtttacatacaccttaggtagtgtatttttttttttttttttatcatcctaaggtgtatgtaaacttccgacttcaactattttttttttttttttttttttggcgatcgcttttttttttttttttgctagaaagagtactgttctggaaactgacttttttttttttttttgcgatcgcctttttttttttttgatacattttagttgaagtcggaagtttacatacaccttaggatgat

SEQ ID NO: 379 - DNA, 260 bp, unidentified
  source 1..260: mol_type = other DNA
cacgtgctaaggtgtatgtaaacttccgacttcaactatttctcgatcattattattttttggcgatcgcttttttttttttttttgttgagaatggtgctagtggtagtgaacagttttttttttttttttgcgatcgccttttttttttttttttttttttagttgaagtcggaagtttacatacaccttagcacgtgttttttttttttttttttttgacgaatactaaggtgtatgtaaacttccgacttcaacta

SEQ ID NO: 380 - DNA, 4721 bp, unidentified
  source 1..4721: mol_type = other DNA
tacactacctaaggtgtatgtaaacttccgacttcaactattttttttttttttttttttttggttacatgcatcagtcaataatgctttttttattttttttatttttttagatgcctccacagcatgaatgtactactcctttttcttcccctcccaccctcattgcatcccaggcttcccctgctccccacccccatgacagacatttttgatgattatcaacagaaactttatttctcatcggttcaggaacaatcggagggtagatggaaagaggaagggagggaaagagggagggaggaagaatcctgcgaaaaggaagggccagactgagggagaagaaaaacatgttcggggcaaaagggtaattctcaagtggggaatgccaaatgaaggggtgcttacatgggggcacaaaattccaaatcagccacagtggggtgaggtgagtatgagacgcaggtgggttgaatgaaggaaagttagtaccacttagggctacaggaccctggggttcttctgtcagaggattggggttcaggtttcaggctttagggtgtaacatgggggggcccagtaggggctatgctggttgcatggggaggccccaggcccctccccaagggcccctccttttgggggaatctcactgacgaggcagagtcgttcactgtagtctggctgcagactctcagccagtcccttagacacaccactccaggcctaaagacagatatgtccaggtcaggggtcaattaggggcaggaagtaaaagaccgagctctgtgccaaaggagtactcatgatgtctgcaaccactgtaattgattacagaagggatacacaggctcctgggcccccaataccagttgccatctgcctcattcaatctataatctgcacttctgtgtgtgtctctctctgtatagtccatgccccatttggtcggccacatcctgacagttagtgcagggcctccttccctctcctctctgcccccacccccacactctgtctgtcttgctggcaggcagttggcagttgatagactgcagcatgcttatgacagcgttctcaccgaaaagttcccgtggtattcagtaacaagatcctctaggttcttcagggtgggaattcggggcatcgtcctgacaggggagaaagagggagcaggagcacataggttaaagcttttttatcacccttctcccagttgtcccatatgaaataaagtgattctgtgttctctgtgcctgtggcttccttccatcaccaaaccctcttgggtaatctctcattacttactgtctcatcctttactcctaaagaccctgcaaaaccctcctctgctattgtcagctaccgttcccctcatttttctgggcttctccaaatctcaccgttccagccagaaatacacacagagaaggctgataatcaatcccatggagccaacagagataaccacggcttccaatgcaaacaggaaaggattctctatagaaaaaagaaaagcaaagtggaccttatatttgttgtgcccctactacatgccaggcactggtgccaggcaccgcgctaaagacatactctctgtttaatcctcacaacagctcctgtgaggcaggaacaattacctccatcttacatcttaggaaacagaatccaagagtttagggatgtggccaaggccaaagaggtagtatgtggcacagcctagatccagctggttccaaagccatcttcaccttgcaggctctctaggaatgcttcagggaaatcctatacattctatagcccccttgagtacccctcagcctccttctcaatccactcccctactctaacaacacgctaacccaaccctacacagaaaaaccttgatttctagaggttggggttagacagtgtggagagatggggcaccaagtttaggggctttagtgacagggaagtggagcaaaagacagtggtgttagaaaggctggggtgttgggctcatggattgggtcatgtgggcccattttaccttttgaagtattgctcccccagtggattgggtggctccattcactccaatgctgagcacttccacagagtgggttaaagcggctccgaacacgaaacgtgtagcgtttctgcccatccacactaggcaaggagaacttatgtctataatccactgattgttccttgaggagaaagaggatgagggaaagtgggtgtctatgagagaagggagaattaaaacatactcctgaacacccaccagtgtcatctctgctactgcccagtttctctctcatctcttgactactcaagccacactgctcccttcactgacttgaatctaatgcctcccctctggatccccttaatggcttccttttgtttacttgtctatctggtatcaggaagagtatgggtagggaatccctaatgaaaactcactggtgtcaggaatggtggctcacgcctgtaatcccagcactttgggaggccgaggtgggcagatcacctgaggtcaggagttcaagaccagcctgaccaacatggcaaaaccctgtctttactaaaaatacaaaaattagccaggcatggttgtgcatgctcccagctacttgggaggctgaagcaggagaatcacttgaaccagggagacagaggtcgcagtgagcccaagatcgccccactgcactcaagcctgggcaacagagtgaggctctgtctcaaaaaaaaaaaaaaaagaaagaaagaaagaaaagaaaagaaaaaaagaaaactcactggagaaaataggggggaaaggagttggaggagggagggtagggggtgagcagagaagctgggaggcagagaacaggagcttgatattaggtccttctatctgtctggttgaatcctttagccctactttcttggccttagctgctacattcacgtccctagtcactcacagtccagctgtggtcccagtcagtccggtactgcaccaagtgctccaaacagtggttcaagaatctgttgttccagttcagttctagctgggattcactcagtttgtgaagtgttaggttctctggagcccaggggatcactggagatatgtgtgcatatgtggtcattcccctggcctagacaagtcaggatcctgaaggtagtgcccctaatacctcctcccttcccatcatgatcccctacctcctcttttctgcccatgtacccttatgataaaagaacactactctgtagactccaatgtcccacagtatccctggtctcttgaccctttctttccaaattacccagattctgcagttttagcatctgtgtggcctgtctcctgggttcccgtgggtcctggagctgaacaacaaatgtttggtagaggtggatctcctttttttgcaactgacagccagaagtgatttcttcagagaatagatagtggctgcacttctggactttatcattatccgagttcttgtacctagaggagaaaggttggaaggaagaggaacagtggggccaatctgggtactgcagatatccagagcctagcctcatctcccctcaaccgacttatgacttaccccaggagaaaacagtggggtacctgggagacttgctaccctctctcttggtctctgatccaacccacctcttcttcatcccctccccctcgtcccttctcataccaataatgcagagtgaggttggtaggctggggctcagagctgctgttccaagtgcaattcatgtactcgacattgaacacaaaacactgaacctctgggaggggcagagtggaaacactgagggagtcagtgggcatagtggtcaggaagaaatctagattggggagaaaatgaaggcagggagggaaagagaaatgatggtcagaaggaggaggccaagcacggtggctcatgtctgtaatcctggtgctttgaaaggctgaggcaggaggatcactagaggccaggagtttgagaccagcctaggcaacatagtgagaccctgcctcaaaagaaagaaagaaacaaacaaacaagaaagaaagaaagaagaagtagcgtgaggcagggaaccctcccccttgcccttcccactccacttttcaattctgcccacatgattgtaatggccagtggcaggcaccagatctctgtacggccccttcccacagccacccttctcaccagccccctccagtcccagatttcccaccagctgtggtgtcttcattcccattgggcgtcagaattgtcgtgttcagccccactcccagcaggggcagctgcaggaataagagggatgtgaatggtaatgatggcttcaacatggcgcttgctcttcattccctgggtgtagtctgtctgtgtcaggaacctgggtccctcacccactacccctccccacccacacgtttcctctgtcatagcttccggtggaaagaaccttataaaccagggctttacagagggtgtggcaaatatgtgctgtgtgacacgggctaagtcctctaggagattaggtgctgctgtaaggtggtaaacagaaactaaagctggatatacaatagtgtcacagactcaaaaatcctcagcccacctagatcctgggaaggatctgttcactgcggccgcatgttcttttttttttttttttttttttttagttgaagtcggaagtttacatacaccttagtattcgtc

SEQ ID NO: 381 - DNA, 260 bp, unidentified
  source 1..260: mol_type = other DNA
cacgtgctaaggtgtatgtaaacttccgacttcaactatttctcgatcattattattttttggcgatcgcttttttttttttttttagcaaattggtaatactcctgcctccacagttttttttttttttttgcgatcgccttttttttttttttttttttttagttgaagtcggaagtttacatacaccttagcacgtgttttttttttttttttttttcagctatactaaggtgtatgtaaacttccgacttcaacta

SEQ ID NO: 382 - DNA, 257 bp, unidentified
  source 1..257: mol_type = other DNA
tagttgaagtcggaagtttacatacaccttagagtatgaatttttttttttttttttatcatcctaaggtgtatgtaaacttccgacttcaactattttttttttttttttttttttggcgatcgcttttttttttttttttccttctcctctaaatcattaccttctataattttttttttttttttgcgatcgcctttttttttttttgatacattttagttgaagtcggaagtttacatacaccttaggatgat

SEQ ID NO: 383 - DNA, 4720 bp, unidentified
  source 1..4720: mol_type = other DNA
ttcatactctaaggtgtatgtaaacttccgacttcaactattttttttttttttttttttttgaacatgcggccgcgtgaacagatccttcccaggatctaggtgggctgaggatttttgagtctgtgacactattgtatatccagctttagtttctgtttaccaccttacagcagcacctaatctcctagaggacttagcccgtgtcacacagcacatatttgccacaccctctgtaaagccctggtttataaggttctttccaccggaagctatgacagaggaaacgtgtgggtggggaggggtagtgggtgagggacccaggttcctgacacagacagactacacccagggaatgaagagcaagcgccatgttgaagccatcattaccattcacatccctcttattcctgcagctgcccctgctgggagtggggctgaacacgacaattctgacgcccaatgggaatgaagacaccacagctggtgggaaatctgggactggagggggctggtgagaagggtggctgtgggaaggggccgtacagagatctggtgcctgccactggccattacaatcatgtgggcagaattgaaaagtggagtgggaagggcaagggggagggttccctgcctcacgctacttcttctttctttctttcttgtttgtttgtttctttctttcttttgaggcagggtctcactatgttgcctaggctggtctcaaactcctggcctctagtgatcctcctgcctcagcctttcaaagcaccaggattacagacatgagccaccgtgcttggcctcctccttctgaccatcatttctctttccctccctgccttcattttctccccaatctagatttcttcctgaccactatgcccactgactccctcagtgtttccactctgcccctcccagaggttcagtgttttgtgttcaatgtcgagtacatgaattgcacttggaacagcagctctgagccccagcctaccaacctcactctgcattattggtatgagaagggacgagggggaggggatgaagaagaggtgggttggatcagagaccaagagagagggtagcaagtctcccaggtaccccactgttttctcctggggtaagtcataagtcggttgaggggagatgaggctaggctctggatatctgcagtacccagattggccccactgttcctcttccttccaacctttctcctctaggtacaagaactcggataatgataaagtccagaagtgcagccactatctattctctgaagaaatcacttctggctgtcagttgcaaaaaaaggagatccacctctaccaaacatttgttgttcagctccaggacccacgggaacccaggagacaggccacacagatgctaaaactgcagaatctgggtaatttggaaagaaagggtcaagagaccagggatactgtgggacattggagtctacagagtagtgttcttttatcataagggtacatgggcagaaaagaggaggtaggggatcatgatgggaagggaggaggtattaggggcactaccttcaggatcctgacttgtctaggccaggggaatgaccacatatgcacacatatctccagtgatcccctgggctccagagaacctaacacttcacaaactgagtgaatcccagctagaactgaactggaacaacagattcttgaaccactgtttggagcacttggtgcagtaccggactgactgggaccacagctggactgtgagtgactagggacgtgaatgtagcagctaaggccaagaaagtagggctaaaggattcaaccagacagatagaaggacctaatatcaagctcctgttctctgcctcccagcttctctgctcaccccctaccctccctcctccaactcctttcccccctattttctccagtgagttttctttttttcttttcttttctttctttctttcttttttttttttttttgagacagagcctcactctgttgcccaggcttgagtgcagtggggcgatcttgggctcactgcgacctctgtctccctggttcaagtgattctcctgcttcagcctcccaagtagctgggagcatgcacaaccatgcctggctaatttttgtatttttagtaaagacagggttttgccatgttggtcaggctggtcttgaactcctgacctcaggtgatctgcccacctcggcctcccaaagtgctgggattacaggcgtgagccaccattcctgacaccagtgagttttcattagggattccctacccatactcttcctgataccagatagacaagtaaacaaaaggaagccattaaggggatccagaggggaggcattagattcaagtcagtgaagggagcagtgtggcttgagtagtcaagagatgagagagaaactgggcagtagcagagatgacactggtgggtgttcaggagtatgttttaattctcccttctctcatagacacccactttccctcatcctctttctcctcaaggaacaatcagtggattatagacataagttctccttgcctagtgtggatgggcagaaacgctacacgtttcgtgttcggagccgctttaacccactctgtggaagtgctcagcattggagtgaatggagccacccaatccactgggggagcaatacttcaaaaggtaaaatgggcccacatgacccaatccatgagcccaacaccccagcctttctaacaccactgtcttttgctccacttccctgtcactaaagcccctaaacttggtgccccatctctccacactgtctaaccccaacctctagaaatcaaggtttttctgtgtagggttgggttagcgtgttgttagagtaggggagtggattgagaaggaggctgaggggtactcaagggggctatagaatgtataggatttccctgaagcattcctagagagcctgcaaggtgaagatggctttggaaccagctggatctaggctgtgccacatactacctctttggccttggccacatccctaaactcttggattctgtttcctaagatgtaagatggaggtaattgttcctgcctcacaggagctgttgtgaggattaaacagagagtatgtctttagcgcggtgcctggcaccagtgcctggcatgtagtaggggcacaacaaatataaggtccactttgcttttcttttttctatagagaatcctttcctgtttgcattggaagccgtggttatctctgttggctccatgggattgattatcagccttctctgtgtgtatttctggctggaacggtgagatttggagaagcccagaaaaatgaggggaacggtagctgacaatagcagaggagggttttgcagggtctttaggagtaaaggatgagacagtaagtaatgagagattacccaagagggtttggtgatggaaggaagccacaggcacagagaacacagaatcactttatttcatatgggacaactgggagaagggtgataaaaaagctttaacctatgtgctcctgctccctctttctcccctgtcaggacgatgccccgaattcccaccctgaagaacctagaggatcttgttactgaataccacgggaacttttcggtgagaacgctgtcataagcatgctgcagtctatcaactgccaactgcctgccagcaagacagacagagtgtgggggtgggggcagagaggagagggaaggaggccctgcactaactgtcaggatgtggccgaccaaatggggcatggactatacagagagagacacacacagaagtgcagattatagattgaatgaggcagatggcaactggtattgggggcccaggagcctgtgtatcccttctgtaatcaattacagtggttgcagacatcatgagtactcctttggcacagagctcggtcttttacttcctgcccctaattgacccctgacctggacatatctgtctttaggcctggagtggtgtgtctaagggactggctgagagtctgcagccagactacagtgaacgactctgcctcgtcagtgagattcccccaaaaggaggggcccttggggaggggcctggggcctccccatgcaaccagcatagcccctactgggcccccccatgttacaccctaaagcctgaaacctgaaccccaatcctctgacagaagaaccccagggtcctgtagccctaagtggtactaactttccttcattcaacccacctgcgtctcatactcacctcaccccactgtggctgatttggaattttgtgcccccatgtaagcaccccttcatttggcattccccacttgagaattacccttttgccccgaacatgtttttcttctccctcagtctggcccttccttttcgcaggattcttcctccctccctctttccctcccttcctctttccatctaccctccgattgttcctgaaccgatgagaaataaagtttctgttgataatcatcaaaaatgtctgtcatgggggtggggagcaggggaagcctgggatgcaatgagggtgggaggggaagaaaaaggagtagtacattcatgctgtggaggcatctaaaaaaataaaaaaaataaaaaaagcattattgactgatgcatgtaaccttttttttttttttttttttttttagttgaagtcggaagtttacatacaccttagtatagctg

SEQ ID NO: 384 - DNA, 257 bp, unidentified
  source 1..257: mol_type = other DNA
ctaaggtgtatgtaaacttccgacttcaactagtagtgtatttttttttttttttttatcatctagttgaagtcggaagtttacatacaccttagttttttttttttttttttttttggcgatcgcttttttttttttttttgctagaaagagtactgttctggaaactgacttttttttttttttttgcgatcgcctttttttttttttgatacatttctaaggtgtatgtaaacttccgacttcaactagatgat

SEQ ID NO: 385 - DNA, 260 bp, unidentified
  source 1..260: mol_type = other DNA
cacgtgtagttgaagtcggaagtttacatacaccttagtttctcgatcattattattttttggcgatcgcttttttttttttttttgttgagaatggtgctagtggtagtgaacagttttttttttttttttgcgatcgcctttttttttttttttttttttctaaggtgtatgtaaacttccgacttcaactacacgtgttttttttttttttttttttgacgaatatagttgaagtcggaagtttacatacaccttag

SEQ ID NO: 386 - DNA, 4721 bp, unidentified
  source 1..4721: mol_type = other DNA
tacactactagttgaagtcggaagtttacatacaccttagttttttttttttttttttttttggttacatgcatcagtcaataatgctttttttattttttttatttttttagatgcctccacagcatgaatgtactactcctttttcttcccctcccaccctcattgcatcccaggcttcccctgctccccacccccatgacagacatttttgatgattatcaacagaaactttatttctcatcggttcaggaacaatcggagggtagatggaaagaggaagggagggaaagagggagggaggaagaatcctgcgaaaaggaagggccagactgagggagaagaaaaacatgttcggggcaaaagggtaattctcaagtggggaatgccaaatgaaggggtgcttacatgggggcacaaaattccaaatcagccacagtggggtgaggtgagtatgagacgcaggtgggttgaatgaaggaaagttagtaccacttagggctacaggaccctggggttcttctgtcagaggattggggttcaggtttcaggctttagggtgtaacatgggggggcccagtaggggctatgctggttgcatggggaggccccaggcccctccccaagggcccctccttttgggggaatctcactgacgaggcagagtcgttcactgtagtctggctgcagactctcagccagtcccttagacacaccactccaggcctaaagacagatatgtccaggtcaggggtcaattaggggcaggaagtaaaagaccgagctctgtgccaaaggagtactcatgatgtctgcaaccactgtaattgattacagaagggatacacaggctcctgggcccccaataccagttgccatctgcctcattcaatctataatctgcacttctgtgtgtgtctctctctgtatagtccatgccccatttggtcggccacatcctgacagttagtgcagggcctccttccctctcctctctgcccccacccccacactctgtctgtcttgctggcaggcagttggcagttgatagactgcagcatgcttatgacagcgttctcaccgaaaagttcccgtggtattcagtaacaagatcctctaggttcttcagggtgggaattcggggcatcgtcctgacaggggagaaagagggagcaggagcacataggttaaagcttttttatcacccttctcccagttgtcccatatgaaataaagtgattctgtgttctctgtgcctgtggcttccttccatcaccaaaccctcttgggtaatctctcattacttactgtctcatcctttactcctaaagaccctgcaaaaccctcctctgctattgtcagctaccgttcccctcatttttctgggcttctccaaatctcaccgttccagccagaaatacacacagagaaggctgataatcaatcccatggagccaacagagataaccacggcttccaatgcaaacaggaaaggattctctatagaaaaaagaaaagcaaagtggaccttatatttgttgtgcccctactacatgccaggcactggtgccaggcaccgcgctaaagacatactctctgtttaatcctcacaacagctcctgtgaggcaggaacaattacctccatcttacatcttaggaaacagaatccaagagtttagggatgtggccaaggccaaagaggtagtatgtggcacagcctagatccagctggttccaaagccatcttcaccttgcaggctctctaggaatgcttcagggaaatcctatacattctatagcccccttgagtacccctcagcctccttctcaatccactcccctactctaacaacacgctaacccaaccctacacagaaaaaccttgatttctagaggttggggttagacagtgtggagagatggggcaccaagtttaggggctttagtgacagggaagtggagcaaaagacagtggtgttagaaaggctggggtgttgggctcatggattgggtcatgtgggcccattttaccttttgaagtattgctcccccagtggattgggtggctccattcactccaatgctgagcacttccacagagtgggttaaagcggctccgaacacgaaacgtgtagcgtttctgcccatccacactaggcaaggagaacttatgtctataatccactgattgttccttgaggagaaagaggatgagggaaagtgggtgtctatgagagaagggagaattaaaacatactcctgaacacccaccagtgtcatctctgctactgcccagtttctctctcatctcttgactactcaagccacactgctcccttcactgacttgaatctaatgcctcccctctggatccccttaatggcttccttttgtttacttgtctatctggtatcaggaagagtatgggtagggaatccctaatgaaaactcactggtgtcaggaatggtggctcacgcctgtaatcccagcactttgggaggccgaggtgggcagatcacctgaggtcaggagttcaagaccagcctgaccaacatggcaaaaccctgtctttactaaaaatacaaaaattagccaggcatggttgtgcatgctcccagctacttgggaggctgaagcaggagaatcacttgaaccagggagacagaggtcgcagtgagcccaagatcgccccactgcactcaagcctgggcaacagagtgaggctctgtctcaaaaaaaaaaaaaaaagaaagaaagaaagaaaagaaaagaaaaaaagaaaactcactggagaaaataggggggaaaggagttggaggagggagggtagggggtgagcagagaagctgggaggcagagaacaggagcttgatattaggtccttctatctgtctggttgaatcctttagccctactttcttggccttagctgctacattcacgtccctagtcactcacagtccagctgtggtcccagtcagtccggtactgcaccaagtgctccaaacagtggttcaagaatctgttgttccagttcagttctagctgggattcactcagtttgtgaagtgttaggttctctggagcccaggggatcactggagatatgtgtgcatatgtggtcattcccctggcctagacaagtcaggatcctgaaggtagtgcccctaatacctcctcccttcccatcatgatcccctacctcctcttttctgcccatgtacccttatgataaaagaacactactctgtagactccaatgtcccacagtatccctggtctcttgaccctttctttccaaattacccagattctgcagttttagcatctgtgtggcctgtctcctgggttcccgtgggtcctggagctgaacaacaaatgtttggtagaggtggatctcctttttttgcaactgacagccagaagtgatttcttcagagaatagatagtggctgcacttctggactttatcattatccgagttcttgtacctagaggagaaaggttggaaggaagaggaacagtggggccaatctgggtactgcagatatccagagcctagcctcatctcccctcaaccgacttatgacttaccccaggagaaaacagtggggtacctgggagacttgctaccctctctcttggtctctgatccaacccacctcttcttcatcccctccccctcgtcccttctcataccaataatgcagagtgaggttggtaggctggggctcagagctgctgttccaagtgcaattcatgtactcgacattgaacacaaaacactgaacctctgggaggggcagagtggaaacactgagggagtcagtgggcatagtggtcaggaagaaatctagattggggagaaaatgaaggcagggagggaaagagaaatgatggtcagaaggaggaggccaagcacggtggctcatgtctgtaatcctggtgctttgaaaggctgaggcaggaggatcactagaggccaggagtttgagaccagcctaggcaacatagtgagaccctgcctcaaaagaaagaaagaaacaaacaaacaagaaagaaagaaagaagaagtagcgtgaggcagggaaccctcccccttgcccttcccactccacttttcaattctgcccacatgattgtaatggccagtggcaggcaccagatctctgtacggccccttcccacagccacccttctcaccagccccctccagtcccagatttcccaccagctgtggtgtcttcattcccattgggcgtcagaattgtcgtgttcagccccactcccagcaggggcagctgcaggaataagagggatgtgaatggtaatgatggcttcaacatggcgcttgctcttcattccctgggtgtagtctgtctgtgtcaggaacctgggtccctcacccactacccctccccacccacacgtttcctctgtcatagcttccggtggaaagaaccttataaaccagggctttacagagggtgtggcaaatatgtgctgtgtgacacgggctaagtcctctaggagattaggtgctgctgtaaggtggtaaacagaaactaaagctggatatacaatagtgtcacagactcaaaaatcctcagcccacctagatcctgggaaggatctgttcactgcggccgcatgttctttttttttttttttttttttttctaaggtgtatgtaaacttccgacttcaactatattcgtc

SEQ ID NO: 387 - DNA, 260 bp, unidentified
  source 1..260: mol_type = other DNA
cacgtgtagttgaagtcggaagtttacatacaccttagtttctcgatcattattattttttggcgatcgcttttttttttttttttagcaaattggtaatactcctgcctccacagttttttttttttttttgcgatcgcctttttttttttttttttttttctaaggtgtatgtaaacttccgacttcaactacacgtgttttttttttttttttttttcagctatatagttgaagtcggaagtttacatacaccttag

SEQ ID NO: 388 - DNA, 257 bp, unidentified
  source 1..257: mol_type = other DNA
ctaaggtgtatgtaaacttccgacttcaactaagtatgaatttttttttttttttttatcatctagttgaagtcggaagtttacatacaccttagttttttttttttttttttttttggcgatcgcttttttttttttttttccttctcctctaaatcattaccttctataattttttttttttttttgcgatcgcctttttttttttttgatacatttctaaggtgtatgtaaacttccgacttcaactagatgat

SEQ ID NO: 389 - DNA, 4720 bp, unidentified
  source 1..4720: mol_type = other DNA
ttcatacttagttgaagtcggaagtttacatacaccttagttttttttttttttttttttttgaacatgcggccgcgtgaacagatccttcccaggatctaggtgggctgaggatttttgagtctgtgacactattgtatatccagctttagtttctgtttaccaccttacagcagcacctaatctcctagaggacttagcccgtgtcacacagcacatatttgccacaccctctgtaaagccctggtttataaggttctttccaccggaagctatgacagaggaaacgtgtgggtggggaggggtagtgggtgagggacccaggttcctgacacagacagactacacccagggaatgaagagcaagcgccatgttgaagccatcattaccattcacatccctcttattcctgcagctgcccctgctgggagtggggctgaacacgacaattctgacgcccaatgggaatgaagacaccacagctggtgggaaatctgggactggagggggctggtgagaagggtggctgtgggaaggggccgtacagagatctggtgcctgccactggccattacaatcatgtgggcagaattgaaaagtggagtgggaagggcaagggggagggttccctgcctcacgctacttcttctttctttctttcttgtttgtttgtttctttctttcttttgaggcagggtctcactatgttgcctaggctggtctcaaactcctggcctctagtgatcctcctgcctcagcctttcaaagcaccaggattacagacatgagccaccgtgcttggcctcctccttctgaccatcatttctctttccctccctgccttcattttctccccaatctagatttcttcctgaccactatgcccactgactccctcagtgtttccactctgcccctcccagaggttcagtgttttgtgttcaatgtcgagtacatgaattgcacttggaacagcagctctgagccccagcctaccaacctcactctgcattattggtatgagaagggacgagggggaggggatgaagaagaggtgggttggatcagagaccaagagagagggtagcaagtctcccaggtaccccactgttttctcctggggtaagtcataagtcggttgaggggagatgaggctaggctctggatatctgcagtacccagattggccccactgttcctcttccttccaacctttctcctctaggtacaagaactcggataatgataaagtccagaagtgcagccactatctattctctgaagaaatcacttctggctgtcagttgcaaaaaaaggagatccacctctaccaaacatttgttgttcagctccaggacccacgggaacccaggagacaggccacacagatgctaaaactgcagaatctgggtaatttggaaagaaagggtcaagagaccagggatactgtgggacattggagtctacagagtagtgttcttttatcataagggtacatgggcagaaaagaggaggtaggggatcatgatgggaagggaggaggtattaggggcactaccttcaggatcctgacttgtctaggccaggggaatgaccacatatgcacacatatctccagtgatcccctgggctccagagaacctaacacttcacaaactgagtgaatcccagctagaactgaactggaacaacagattcttgaaccactgtttggagcacttggtgcagtaccggactgactgggaccacagctggactgtgagtgactagggacgtgaatgtagcagctaaggccaagaaagtagggctaaaggattcaaccagacagatagaaggacctaatatcaagctcctgttctctgcctcccagcttctctgctcaccccctaccctccctcctccaactcctttcccccctattttctccagtgagttttctttttttcttttcttttctttctttctttcttttttttttttttttgagacagagcctcactctgttgcccaggcttgagtgcagtggggcgatcttgggctcactgcgacctctgtctccctggttcaagtgattctcctgcttcagcctcccaagtagctgggagcatgcacaaccatgcctggctaatttttgtatttttagtaaagacagggttttgccatgttggtcaggctggtcttgaactcctgacctcaggtgatctgcccacctcggcctcccaaagtgctgggattacaggcgtgagccaccattcctgacaccagtgagttttcattagggattccctacccatactcttcctgataccagatagacaagtaaacaaaaggaagccattaaggggatccagaggggaggcattagattcaagtcagtgaagggagcagtgtggcttgagtagtcaagagatgagagagaaactgggcagtagcagagatgacactggtgggtgttcaggagtatgttttaattctcccttctctcatagacacccactttccctcatcctctttctcctcaaggaacaatcagtggattatagacataagttctccttgcctagtgtggatgggcagaaacgctacacgtttcgtgttcggagccgctttaacccactctgtggaagtgctcagcattggagtgaatggagccacccaatccactgggggagcaatacttcaaaaggtaaaatgggcccacatgacccaatccatgagcccaacaccccagcctttctaacaccactgtcttttgctccacttccctgtcactaaagcccctaaacttggtgccccatctctccacactgtctaaccccaacctctagaaatcaaggtttttctgtgtagggttgggttagcgtgttgttagagtaggggagtggattgagaaggaggctgaggggtactcaagggggctatagaatgtataggatttccctgaagcattcctagagagcctgcaaggtgaagatggctttggaaccagctggatctaggctgtgccacatactacctctttggccttggccacatccctaaactcttggattctgtttcctaagatgtaagatggaggtaattgttcctgcctcacaggagctgttgtgaggattaaacagagagtatgtctttagcgcggtgcctggcaccagtgcctggcatgtagtaggggcacaacaaatataaggtccactttgcttttcttttttctatagagaatcctttcctgtttgcattggaagccgtggttatctctgttggctccatgggattgattatcagccttctctgtgtgtatttctggctggaacggtgagatttggagaagcccagaaaaatgaggggaacggtagctgacaatagcagaggagggttttgcagggtctttaggagtaaaggatgagacagtaagtaatgagagattacccaagagggtttggtgatggaaggaagccacaggcacagagaacacagaatcactttatttcatatgggacaactgggagaagggtgataaaaaagctttaacctatgtgctcctgctccctctttctcccctgtcaggacgatgccccgaattcccaccctgaagaacctagaggatcttgttactgaataccacgggaacttttcggtgagaacgctgtcataagcatgctgcagtctatcaactgccaactgcctgccagcaagacagacagagtgtgggggtgggggcagagaggagagggaaggaggccctgcactaactgtcaggatgtggccgaccaaatggggcatggactatacagagagagacacacacagaagtgcagattatagattgaatgaggcagatggcaactggtattgggggcccaggagcctgtgtatcccttctgtaatcaattacagtggttgcagacatcatgagtactcctttggcacagagctcggtcttttacttcctgcccctaattgacccctgacctggacatatctgtctttaggcctggagtggtgtgtctaagggactggctgagagtctgcagccagactacagtgaacgactctgcctcgtcagtgagattcccccaaaaggaggggcccttggggaggggcctggggcctccccatgcaaccagcatagcccctactgggcccccccatgttacaccctaaagcctgaaacctgaaccccaatcctctgacagaagaaccccagggtcctgtagccctaagtggtactaactttccttcattcaacccacctgcgtctcatactcacctcaccccactgtggctgatttggaattttgtgcccccatgtaagcaccccttcatttggcattccccacttgagaattacccttttgccccgaacatgtttttcttctccctcagtctggcccttccttttcgcaggattcttcctccctccctctttccctcccttcctctttccatctaccctccgattgttcctgaaccgatgagaaataaagtttctgttgataatcatcaaaaatgtctgtcatgggggtggggagcaggggaagcctgggatgcaatgagggtgggaggggaagaaaaaggagtagtacattcatgctgtggaggcatctaaaaaaataaaaaaaataaaaaaagcattattgactgatgcatgtaacctttttttttttttttttttttttctaaggtgtatgtaaacttccgacttcaactatatagctg

SEQ ID NO: 390 - DNA, 251 bp, unidentified
  source 1..251: mol_type = other DNA
tagttgaagtcggaagtttacatacaccttaggtagtgtatttttttttttttttttatcatcctaaggtgtatgtaaacttccgacttcaactattttttttttttttttttttttgcgaccttttttttttttttttgctagaaagagtactgttctggaaactgacttttttttttttttttggtcgctttttttttttttgatacattttagttgaagtcggaagtttacatacaccttaggatgat

SEQ ID NO: 391 - DNA, 253 bp, unidentified
  source 1..253: mol_type = other DNA
cacgtgctaaggtgtatgtaaacttccgacttcaactatttctcgatcattattattttttgcgaccttttttttttttttttgttgagaatggtgctagtggtagtgaacagtttttttttttttttggtcgcttttttttttttttttttttttagttgaagtcggaagtttacatacaccttagcacgtgttttttttttttttttttttgacgaatactaaggtgtatgtaaacttccgacttcaacta

SEQ ID NO: 392 - DNA, 4721 bp, unidentified; identical to SEQ ID NO: 380
  source 1..4721: mol_type = other DNA

SEQ ID NO: 393 - DNA, 254 bp, unidentified
  source 1..254: mol_type = other DNA
cacgtgctaaggtgtatgtaaacttccgacttcaactatttctcgatcattattattttttgcgaccttttttttttttttttagcaaattggtaatactcctgcctccacagttttttttttttttttggtcgcttttttttttttttttttttttagttgaagtcggaagtttacatacaccttagcacgtgttttttttttttttttttttcagctatactaaggtgtatgtaaacttccgacttcaacta

SEQ ID NO: 394 - DNA, 251 bp, unidentified
  source 1..251: mol_type = other DNA
tagttgaagtcggaagtttacatacaccttagagtatgaatttttttttttttttttatcatcctaaggtgtatgtaaacttccgacttcaactattttttttttttttttttttttgcgaccttttttttttttttttccttctcctctaaatcattaccttctataattttttttttttttttggtcgctttttttttttttgatacattttagttgaagtcggaagtttacatacaccttaggatgat

SEQ ID NO: 395 - DNA, 4720 bp, unidentified; identical to SEQ ID NO: 383
  source 1..4720: mol_type = other DNA

SEQ ID NO: 396 - DNA, 251 bp, unidentified
  source 1..251: mol_type = other DNA
ctaaggtgtatgtaaacttccgacttcaactagtagtgtatttttttttttttttttatcatctagttgaagtcggaagtttacatacaccttagttttttttttttttttttttttgcgaccttttttttttttttttgctagaaagagtactgttctggaaactgacttttttttttttttttggtcgctttttttttttttgatacatttctaaggtgtatgtaaacttccgacttcaactagatgat

SEQ ID NO: 397 - DNA, 254 bp, unidentified
  source 1..254: mol_type = other DNA
cacgtgtagttgaagtcggaagtttacatacaccttagtttctcgatcattattattttttgcgaccttttttttttttttttgttgagaatggtgctagtggtagtgaacagttttttttttttttttggtcgctttttttttttttttttttttctaaggtgtatgtaaacttccgacttcaactacacgtgttttttttttttttttttttgacgaatatagttgaagtcggaagtttacatacaccttag

SEQ ID NO: 398 - DNA, 4721 bp, unidentified; identical to SEQ ID NO: 386
  source 1..4721: mol_type = other DNA

SEQ ID NO: 399 - DNA, 254 bp, unidentified
  source 1..254: mol_type = other DNA
cacgtgtagttgaagtcggaagtttacatacaccttagtttctcgatcattattattttttgcgaccttttttttttttttttagcaaattggtaatactcctgcctccacagttttttttttttttttggtcgctttttttttttttttttttttctaaggtgtatgtaaacttccgacttcaactacacgtgttttttttttttttttttttcagctatatagttgaagtcggaagtttacatacaccttag

SEQ ID NO: 400 - DNA, 251 bp, unidentified
  source 1..251: mol_type = other DNA
ctaaggtgtatgtaaacttccgacttcaactaagtatgaatttttttttttttttttatcatctagttgaagtcggaagtttacatacaccttagttttttttttttttttttttttgcgaccttttttttttttttttccttctcctctaaatcattaccttctataattttttttttttttttggtcgctttttttttttttgatacatttctaaggtgtatgtaaacttccgacttcaactagatgat

SEQ ID NO: 401 - DNA, 4720 bp, unidentified; identical to SEQ ID NO: 389
  source 1..4720: mol_type = other DNA

SEQ ID NO: 402 - DNA, 263 bp, unidentified
  source 1..263: mol_type = other DNA
tagttgaagtcggaagtttacatacaccttaggtagtgtatttttttttttttttttatcatcctaaggtgtatgtaaacttccgacttcaactattttttttttttttttttttttgcggcgatcggcttttttttttttttttgctagaaagagtactgttctggaaactgacttttttttttttttttgccgatcgccgctttttttttttttgatacattttagttgaagtcggaagtttacatacaccttaggatgat

SEQ ID NO: 403 - DNA, 266 bp, unidentified
  source 1..266: mol_type = other DNA
cacgtgctaaggtgtatgtaaacttccgacttcaactatttctcgatcattattattttttgcggcgatcggcttttttttttttttttgttgagaatggtgctagtggtagtgaacagttttttttttttttttgccgatcgccgcttttttttttttttttttttttagttgaagtcggaagtttacatacaccttagcacgtgttttttttttttttttttttgacgaatactaaggtgtatgtaaacttccgacttcaacta

SEQ ID NO: 404 - DNA, 4721 bp, unidentified; identical to SEQ ID NO: 380
  source 1..4721: mol_type = other DNA

SEQ ID NO: 405 - DNA, 266 bp, unidentified
  source 1..266: mol_type = other DNA
cacgtgctaaggtgtatgtaaacttccgacttcaactatttctcgatcattattattttttgcggcgatcggcttttttttttttttttagcaaattggtaatactcctgcctccacagttttttttttttttttgccgatcgccgcttttttttttttttttttttttagttgaagtcggaagtttacatacaccttagcacgtgttttttttttttttttttttcagctatactaaggtgtatgtaaacttccgacttcaacta

SEQ ID NO: 406 - DNA, 263 bp, unidentified
  source 1..263: mol_type = other DNA
tagttgaagtcggaagtttacatacaccttagagtatgaatttttttttttttttttatcatcctaaggtgtatgtaaacttccgacttcaactattttttttttttttttttttttgcggcgatcggcttttttttttttttttccttctcctctaaatcattaccttctataattttttttttttttttgccgatcgccgctttttttttttttgatacattttagttgaagtcggaagtttacatacaccttaggatgat

SEQ ID NO: 407 - DNA, 4720 bp, unidentified; identical to SEQ ID NO: 383
  source 1..4720: mol_type = other DNA

SEQ ID NO: 408 - DNA, 263 bp, unidentified
  source 1..263: mol_type = other DNA
ctaaggtgtatgtaaacttccgacttcaactagtagtgtatttttttttttttttttatcatctagttgaagtcggaagtttacatacaccttagttttttttttttttttttttttgcggcgatcggcttttttttttttttttgctagaaagagtactgttctggaaactgacttttttttttttttttgccgatcgccgctttttttttttttgatacatttctaaggtgtatgtaaacttccgacttcaactagatgat

SEQ ID NO: 409 - DNA, 266 bp, unidentified
  source 1..266: mol_type = other DNA
cacgtgtagttgaagtcggaagtttacatacaccttagtttctcgatcattattattttttgcggcgatcggcttttttttttttttttgttgagaatggtgctagtggtagtgaacagttttttttttttttttgccgatcgccgctttttttttttttttttttttctaaggtgtatgtaaacttccgacttcaactacacgtgttttttttttttttttttttgacgaatatagttgaagtcggaagtttacatacaccttag

SEQ ID NO: 410 - DNA, 4721 bp, unidentified; identical to SEQ ID NO: 386
  source 1..4721: mol_type = other DNA

SEQ ID NO: 411 - DNA, 266 bp, unidentified
  source 1..266: mol_type = other DNA
cacgtgtagttgaagtcggaagtttacatacaccttagtttctcgatcattattattttttgcggcgatcggcttttttttttttttttagcaaattggtaatactcctgcctccacagttttttttttttttttgccgatcgccgctttttttttttttttttttttctaaggtgtatgtaaacttccgacttcaactacacgtgttttttttttttttttttttcagctatatagttgaagtcggaagtttacatacaccttag

SEQ ID NO: 412 - DNA, 263 bp, unidentified
  source 1..263: mol_type = other DNA
ctaaggtgtatgtaaacttccgacttcaactaagtatgaatttttttttttttttttatcatctagttgaagtcggaagtttacatacaccttagttttttttttttttttttttttgcggcgatcggcttttttttttttttttccttctcctctaaatcattaccttctataattttttttttttttttgccgatcgccgctttttttttttttgatacatttctaaggtgtatgtaaacttccgacttcaactagatgat

SEQ ID NO: 413 - DNA, 4721 bp, unidentified
  source 1..4721: mol_type = other DNA
ttcatacttagttgaagtcggaagtttacatacaccttagttttttttttttttttttttttgaacatgcggccgcagtgaacagatccttcccaggatctaggtgggctgaggatttttgagtctgtgacactattgtatatccagctttagtttctgtttaccaccttacagcagcacctaatctcctagaggacttagcccgtgtcacacagcacatatttgccacaccctctgtaaagccctggtttataaggttctttccaccggaagctatgacagaggaaacgtgtgggtggggaggggtagtgggtgagggacccaggttcctgacacagacagactacacccagggaatgaagagcaagcgccatgttgaagccatcattaccattcacatccctcttattcctgcagctgcccctgctgggagtggggctgaacacgacaattctgacgcccaatgggaatgaagacaccacagctggtgggaaatctgggactggagggggctggtgagaagggtggctgtgggaaggggccgtacagagatctggtgcctgccactggccattacaatcatgtgggcagaattgaaaagtggagtgggaagggcaagggggagggttccctgcctcacgctacttcttctttctttctttcttgtttgtttgtttctttctttcttttgaggcagggtctcactatgttgcctaggctggtctcaaactcctggcctctagtgatcctcctgcctcagcctttcaaagcaccaggattacagacatgagccaccgtgcttggcctcctccttctgaccatcatttctctttccctccctgccttcattttctccccaatctagatttcttcctgaccactatgcccactgactccctcagtgtttccactctgcccctcccagaggttcagtgttttgtgttcaatgtcgagtacatgaattgcacttggaacagcagctctgagccccagcctaccaacctcactctgcattattggtatgagaagggacgagggggaggggatgaagaagaggtgggttggatcagagaccaagagagagggtagcaagtctcccaggtaccccactgttttctcctggggtaagtcataagtcggttgaggggagatgaggctaggctctggatatctgcagtacccagattggccccactgttcctcttccttccaacctttctcctctaggtacaagaactcggataatgataaagtccagaagtgcagccactatctattctctgaagaaatcacttctggctgtcagttgcaaaaaaaggagatccacctctaccaaacatttgttgttcagctccaggacccacgggaacccaggagacaggccacacagatgctaaaactgcagaatctgggtaatttggaaagaaagggtcaagagaccagggatactgtgggacattggagtctacagagtagtgttcttttatcataagggtacatgggcagaaaagaggaggtaggggatcatgatgggaagggaggaggtattaggggcactaccttcaggatcctgacttgtctaggccaggggaatgaccacatatgcacacatatctccagtgatcccctgggctccagagaacctaacacttcacaaactgagtgaatcccagctagaactgaactggaacaacagattcttgaaccactgtttggagcacttggtgcagtaccggactgactgggaccacagctggactgtgagtgactagggacgtgaatgtagcagctaaggccaagaaagtagggctaaaggattcaaccagacagatagaaggacctaatatcaagctcctgttctctgcctcccagcttctctgctcaccccctaccctccctcctccaactcctttcccccctattttctccagtgagttttctttttttcttttcttttctttctttctttcttttttttttttttttgagacagagcctcactctgttgcccaggcttgagtgcagtggggcgatcttgggctcactgcgacctctgtctccctggttcaagtgattctcctgcttcagcctcccaagtagctgggagcatgcacaaccatgcctggctaatttttgtatttttagtaaagacagggttttgccatgttggtcaggctggtcttgaactcctgacctcaggtgatctgcccacctcggcctcccaaagtgctgggattacaggcgtgagccaccattcctgacaccagtgagttttcattagggattccctacccatactcttcctgataccagatagacaagtaaacaaaaggaagccattaaggggatccagaggggaggcattagattcaagtcagtgaagggagcagtgtggcttgagtagtcaagagatgagagagaaactgggcagtagcagagatgacactggtgggtgttcaggagtatgttttaattctcccttctctcatagacacccactttccctcatcctctttctcctcaaggaacaatcagtggattatagacataagttctccttgcctagtgtggatgggcagaaacgctacacgtttcgtgttcggagccgctttaacccactctgtggaagtgctcagcattggagtgaatggagccacccaatccactgggggagcaatacttcaaaaggtaaaatgggcccacatgacccaatccatgagcccaacaccccagcctttctaacaccactgtcttttgctccacttccctgtcactaaagcccctaaacttggtgccccatctctccacactgtctaaccccaacctctagaaatcaaggtttttctgtgtagggttgggttagcgtgttgttagagtaggggagtggattgagaaggaggctgaggggtactcaagggggctatagaatgtataggatttccctgaagcattcctagagagcctgcaaggtgaagatggctttggaaccagctggatctaggctgtgccacatactacctctttggccttggccacatccctaaactcttggattctgtttcctaagatgtaagatggaggtaattgttcctgcctcacaggagctgttgtgaggattaaacagagagtatgtctttagcgcggtgcctggcaccagtgcctggcatgtagtaggggcacaacaaatataaggtccactttgcttttcttttttctatagagaatcctttcctgtttgcattggaagccgtggttatctctgttggctccatgggattgattatcagccttctctgtgtgtatttctggctggaacggtgagatttggagaagcccagaaaaatgaggggaacggtagctgacaatagcagaggagggttttgcagggtctttaggagtaaaggatgagacagtaagtaatgagagattacccaagagggtttggtgatggaaggaagccacaggcacagagaacacagaatcactttatttcatatgggacaactgggagaagggtgataaaaaagctttaacctatgtgctcctgctccctctttctcccctgtcaggacgatgccccgaattcccaccctgaagaacctagaggatcttgttactgaataccacgggaacttttcggtgagaacgctgtcataagcatgctgcagtctatcaactgccaactgcctgccagcaagacagacagagtgtgggggtgggggcagagaggagagggaaggaggccctgcactaactgtcaggatgtggccgaccaaatggggcatggactatacagagagagacacacacagaagtgcagattatagattgaatgaggcagatggcaactggtattgggggcccaggagcctgtgtatcccttctgtaatcaattacagtggttgcagacatcatgagtactcctttggcacagagctcggtcttttacttcctgcccctaattgacccctgacctggacatatctgtctttaggcctggagtggtgtgtctaagggactggctgagagtctgcagccagactacagtgaacgactctgcctcgtcagtgagattcccccaaaaggaggggcccttggggaggggcctggggcctccccatgcaaccagcatagcccctactgggcccccccatgttacaccctaaagcctgaaacctgaaccccaatcctctgacagaagaaccccagggtcctgtagccctaagtggtactaactttccttcattcaacccacctgcgtctcatactcacctcaccccactgtggctgatttggaattttgtgcccccatgtaagcaccccttcatttggcattccccacttgagaattacccttttgccccgaacatgtttttcttctccctcagtctggcccttccttttcgcaggattcttcctccctccctctttccctcccttcctctttccatctaccctccgattgttcctgaaccgatgagaaataaagtttctgttgataatcatcaaaaatgtctgtcatgggggtggggagcaggggaagcctgggatgcaatgagggtgggaggggaagaaaaaggagtagtacattcatgctgtggaggcatctaaaaaaataaaaaaaataaaaaaagcattattgactgatgcatgtaacctttttttttttttttttttttttctaaggtgtatgtaaacttccgacttcaactatatagctg

SEQ ID NO: 414 - DNA, 257 bp, unidentified
  source 1..257: mol_type = other DNA
cagttgaagtcggaagtttacatacaccttaggtagtgtatttttttttttttttttatcatcctaaggtgtatgtaaacttccgacttcaactgttttttttttttttttttttttggcgatcgcttttttttttttttttgctagaaagagtactgttctggaaactgacttttttttttttttttgcgatcgcctttttttttttttgatacatttcagttgaagtcggaagtttacatacaccttaggatgat

SEQ ID NO: 415 - DNA, 260 bp, unidentified
  source 1..260: mol_type = other DNA
cacgtgctaaggtgtatgtaaacttccgacttcaactgtttctcgatcattattattttttggcgatcgcttttttttttttttttgttgagaatggtgctagtggtagtgaacagttttttttttttttttgcgatcgcctttttttttttttttttttttcagttgaagtcggaagtttacatacaccttagcacgtgttttttttttttttttttttgacgaatactaaggtgtatgtaaacttccgacttcaactg

SEQ ID NO: 416 - DNA, 4721 bp, unidentified
  source 1..4721: mol_type = other DNA
tacactacctaaggtgtatgtaaacttccgacttcaactgttttttttttttttttttttttggttacatgcatcagtcaataatgctttttttattttttttatttttttagatgcctccacagcatgaatgtactactcctttttcttcccctcccaccctcattgcatcccaggcttcccctgctccccacccccatgacagacatttttgatgattatcaacagaaactttatttctcatcggttcaggaacaatcggagggtagatggaaagaggaagggagggaaagagggagggaggaagaatcctgcgaaaaggaagggccagactgagggagaagaaaaacatgttcggggcaaaagggtaattctcaagtggggaatgccaaatgaaggggtgcttacatgggggcacaaaattccaaatcagccacagtggggtgaggtgagtatgagacgcaggtgggttgaatgaaggaaagttagtaccacttagggctacaggaccctggggttcttctgtcagaggattggggttcaggtttcaggctttagggtgtaacatgggggggcccagtaggggctatgctggttgcatggggaggccccaggcccctccccaagggcccctccttttgggggaatctcactgacgaggcagagtcgttcactgtagtctggctgcagactctcagccagtcccttagacacaccactccaggcctaaagacagatatgtccaggtcaggggtcaattaggggcaggaagtaaaagaccgagctctgtgccaaaggagtactcatgatgtctgcaaccactgtaattgattacagaagggatacacaggctcctgggcccccaataccagttgccatctgcctcattcaatctataatctgcacttctgtgtgtgtctctctctgtatagtccatgccccatttggtcggccacatcctgacagttagtgcagggcctccttccctctcctctctgcccccacccccacactctgtctgtcttgctggcaggcagttggcagttgatagactgcagcatgcttatgacagcgttctcaccgaaaagttcccgtggtattcagtaacaagatcctctaggttcttcagggtgggaattcggggcatcgtcctgacaggggagaaagagggagcaggagcacataggttaaagcttttttatcacccttctcccagttgtcccatatgaaataaagtgattctgtgttctctgtgcctgtggcttccttccatcaccaaaccctcttgggtaatctctcattacttactgtctcatcctttactcctaaagaccctgcaaaaccctcctctgctattgtcagctaccgttcccctcatttttctgggcttctccaaatctcaccgttccagccagaaatacacacagagaaggctgataatcaatcccatggagccaacagagataaccacggcttccaatgcaaacaggaaaggattctctatagaaaaaagaaaagcaaagtggaccttatatttgttgtgcccctactacatgccaggcactggtgccaggcaccgcgctaaagacatactctctgtttaatcctcacaacagctcctgtgaggcaggaacaattacctccatcttacatcttaggaaacagaatccaagagtttagggatgtggccaaggccaaagaggtagtatgtggcacagcctagatccagctggttccaaagccatcttcaccttgcaggctctctaggaatgcttcagggaaatcctatacattctatagcccccttgagtacccctcagcctccttctcaatccactcccctactctaacaacacgctaacccaaccctacacagaaaaaccttgatttctagaggttggggttagacagtgtggagagatggggcaccaagtttaggggctttagtgacagggaagtggagcaaaagacagtggtgttagaaaggctggggtgttgggctcatggattgggtcatgtgggcccattttaccttttgaagtattgctcccccagtggattgggtggctccattcactccaatgctgagcacttccacagagtgggttaaagcggctccgaacacgaaacgtgtagcgtttctgcccatccacactaggcaaggagaacttatgtctataatccactgattgttccttgaggagaaagaggatgagggaaagtgggtgtctatgagagaagggagaattaaaacatactcctgaacacccaccagtgtcatctctgctactgcccagtttctctctcatctcttgactactcaagccacactgctcccttcactgacttgaatctaatgcctcccctctggatccccttaatggcttccttttgtttacttgtctatctggtatcaggaagagtatgggtagggaatccctaatgaaaactcactggtgtcaggaatggtggctcacgcctgtaatcccagcactttgggaggccgaggtgggcagatcacctgaggtcaggagttcaagaccagcctgaccaacatggcaaaaccctgtctttactaaaaatacaaaaattagccaggcatggttgtgcatgctcccagctacttgggaggctgaagcaggagaatcacttgaaccagggagacagaggtcgcagtgagcccaagatcgccccactgcactcaagcctgggcaacagagtgaggctctgtctcaaaaaaaaaaaaaaaagaaagaaagaaagaaaagaaaagaaaaaaagaaaactcactggagaaaataggggggaaaggagttggaggagggagggtagggggtgagcagagaagctgggaggcagagaacaggagcttgatattaggtccttctatctgtctggttgaatcctttagccctactttcttggccttagctgctacattcacgtccctagtcactcacagtccagctgtggtcccagtcagtccggtactgcaccaagtgctccaaacagtggttcaagaatctgttgttccagttcagttctagctgggattcactcagtttgtgaagtgttaggttctctggagcccaggggatcactggagatatgtgtgcatatgtggtcattcccctggcctagacaagtcaggatcctgaaggtagtgcccctaatacctcctcccttcccatcatgatcccctacctcctcttttctgcccatgtacccttatgataaaagaacactactctgtagactccaatgtcccacagtatccctggtctcttgaccctttctttccaaattacccagattctgcagttttagcatctgtgtggcctgtctcctgggttcccgtgggtcctggagctgaacaacaaatgtttggtagaggtggatctcctttttttgcaactgacagccagaagtgatttcttcagagaatagatagtggctgcacttctggactttatcattatccgagttcttgtacctagaggagaaaggttggaaggaagaggaacagtggggccaatctgggtactgcagatatccagagcctagcctcatctcccctcaaccgacttatgacttaccccaggagaaaacagtggggtacctgggagacttgctaccctctctcttggtctctgatccaacccacctcttcttcatcccctccccctcgtcccttctcataccaataatgcagagtgaggttggtaggctggggctcagagctgctgttccaagtgcaattcatgtactcgacattgaacacaaaacactgaacctctgggaggggcagagtggaaacactgagggagtcagtgggcatagtggtcaggaagaaatctagattggggagaaaatgaaggcagggagggaaagagaaatgatggtcagaaggaggaggccaagcacggtggctcatgtctgtaatcctggtgctttgaaaggctgaggcaggaggatcactagaggccaggagtttgagaccagcctaggcaacatagtgagaccctgcctcaaaagaaagaaagaaacaaacaaacaagaaagaaagaaagaagaagtagcgtgaggcagggaaccctcccccttgcccttcccactccacttttcaattctgcccacatgattgtaatggccagtggcaggcaccagatctctgtacggccccttcccacagccacccttctcaccagccccctccagtcccagatttcccaccagctgtggtgtcttcattcccattgggcgtcagaattgtcgtgttcagccccactcccagcaggggcagctgcaggaataagagggatgtgaatggtaatgatggcttcaacatggcgcttgctcttcattccctgggtgtagtctgtctgtgtcaggaacctgggtccctcacccactacccctccccacccacacgtttcctctgtcatagcttccggtggaaagaaccttataaaccagggctttacagagggtgtggcaaatatgtgctgtgtgacacgggctaagtcctctaggagattaggtgctgctgtaaggtggtaaacagaaactaaagctggatatacaatagtgtcacagactcaaaaatcctcagcccacctagatcctgggaaggatctgttcactgcggccgcatgttctttttttttttttttttttttttcagttgaagtcggaagtttacatacaccttagtattcgtc

SEQ ID NO: 417 - DNA, 260 bp, unidentified
  source 1..260: mol_type = other DNA
cacgtgctaaggtgtatgtaaacttccgacttcaactgtttctcgatcattattattttttggcgatcgcttttttttttttttttagcaaattggtaatactcctgcctccacagttttttttttttttttgcgatcgcctttttttttttttttttttttcagttgaagtcggaagtttacatacaccttagcacgtgttttttttttttttttttttcagctatactaaggtgtatgtaaacttccgacttcaactg

SEQ ID NO: 418 - DNA, 257 bp, unidentified
  source 1..257: mol_type = other DNA
cagttgaagtcggaagtttacatacaccttagagtatgaatttttttttttttttttatcatcctaaggtgtatgtaaacttccgacttcaactgttttttttttttttttttttttggcgatcgcttttttttttttttttccttctcctctaaatcattaccttctataattttttttttttttttgcgatcgcctttttttttttttgatacatttcagttgaagtcggaagtttacatacaccttaggatgat

SEQ ID NO: 419 - DNA, 4720 bp, unidentified
  source 1..4720: mol_type = other DNA
ttcatactctaaggtgtatgtaaacttccgacttcaactgttttttttttttttttttttttgaacatgcggccgcgtgaacagatccttcccaggatctaggtgggctgaggatttttgagtctgtgacactattgtatatccagctttagtttctgtttaccaccttacagcagcacctaatctcctagaggacttagcccgtgtcacacagcacatatttgccacaccctctgtaaagccctggtttataaggttctttccaccggaagctatgacagaggaaacgtgtgggtggggaggggtagtgggtgagggacccaggttcctgacacagacagactacacccagggaatgaagagcaagcgccatgttgaagccatcattaccattcacatccctcttattcctgcagctgcccctgctgggagtggggctgaacacgacaattctgacgcccaatgggaatgaagacaccacagctggtgggaaatctgggactggagggggctggtgagaagggtggctgtgggaaggggccgtacagagatctggtgcctgccactggccattacaatcatgtgggcagaattgaaaagtggagtgggaagggcaagggggagggttccctgcctcacgctacttcttctttctttctttcttgtttgtttgtttctttctttcttttgaggcagggtctcactatgttgcctaggctggtctcaaactcctggcctctagtgatcctcctgcctcagcctttcaaagcaccaggattacagacatgagccaccgtgcttggcctcctccttctgaccatcatttctctttccctccctgccttcattttctccccaatctagatttcttcctgaccactatgcccactgactccctcagtgtttccactctgcccctcccagaggttcagtgttttgtgttcaatgtcgagtacatgaattgcacttggaacagcagctctgagccccagcctaccaacctcactctgcattattggtatgagaagggacgagggggaggggatgaagaagaggtgggttggatcagagaccaagagagagggtagcaagtctcccaggtaccccactgttttctcctggggtaagtcataagtcggttgaggggagatgaggctaggctctggatatctgcagtacccagattggccccactgttcctcttccttccaacctttctcctctaggtacaagaactcggataatgataaagtccagaagtgcagccactatctattctctgaagaaatcacttctggctgtcagttgcaaaaaaaggagatccacctctaccaaacatttgttgttcagctccaggacccacgggaacccaggagacaggccacacagatgctaaaactgcagaatctgggtaatttggaaagaaagggtcaagagaccagggatactgtgggacattggagtctacagagtagtgttcttttatcataagggtacatgggcagaaaagaggaggtaggggatcatgatgggaagggaggaggtattaggggcactaccttcaggatcctgacttgtctaggccaggggaatgaccacatatgcacacatatctccagtgatcccctgggctccagagaacctaacacttcacaaactgagtgaatcccagctagaactgaactggaacaacagattcttgaaccactgtttggagcacttggtgcagtaccggactgactgggaccacagctggactgtgagtgactagggacgtgaatgtagcagctaaggccaagaaagtagggctaaaggattcaaccagacagatagaaggacctaatatcaagctcctgttctctgcctcccagcttctctgctcaccccctaccctccctcctccaactcctttcccccctattttctccagtgagttttctttttttcttttcttttctttctttctttcttttttttttttttttgagacagagcctcactctgttgcccaggcttgagtgcagtggggcgatcttgggctcactgcgacctctgtctccctggttcaagtgattctcctgcttcagcctcccaagtagctgggagcatgcacaaccatgcctggctaatttttgtatttttagtaaagacagggttttgccatgttggtcaggctggtcttgaactcctgacctcaggtgatctgcccacctcggcctcccaaagtgctgggattacaggcgtgagccaccattcctgacaccagtgagttttcattagggattccctacccatactcttcctgataccagatagacaagtaaacaaaaggaagccattaaggggatccagaggggaggcattagattcaagtcagtgaagggagcagtgtggcttgagtagtcaagagatgagagagaaactgggcagtagcagagatgacactggtgggtgttcaggagtatgttttaattctcccttctctcatagacacccactttccctcatcctctttctcctcaaggaacaatcagtggattatagacataagttctccttgcctagtgtggatgggcagaaacgctacacgtttcgtgttcggagccgctttaacccactctgtggaagtgctcagcattggagtgaatggagccacccaatccactgggggagcaatacttcaaaaggtaaaatgggcccacatgacccaatccatgagcccaacaccccagcctttctaacaccactgtcttttgctccacttccctgtcactaaagcccctaaacttggtgccccatctctccacactgtctaaccccaacctctagaaatcaaggtttttctgtgtagggttgggttagcgtgttgttagagtaggggagtggattgagaaggaggctgaggggtactcaagggggctatagaatgtataggatttccctgaagcattcctagagagcctgcaaggtgaagatggctttggaaccagctggatctaggctgtgccacatactacctctttggccttggccacatccctaaactcttggattctgtttcctaagatgtaagatggaggtaattgttcctgcctcacaggagctgttgtgaggattaaacagagagtatgtctttagcgcggtgcctggcaccagtgcctggcatgtagtaggggcacaacaaatataaggtccactttgcttttcttttttctatagagaatcctttcctgtttgcattggaagccgtggttatctctgttggctccatgggattgattatcagccttctctgtgtgtatttctggctggaacggtgagatttggagaagcccagaaaaatgaggggaacggtagctgacaatagcagaggagggttttgcagggtctttaggagtaaaggatgagacagtaagtaatgagagattacccaagagggtttggtgatggaaggaagccacaggcacagagaacacagaatcactttatttcatatgggacaactgggagaagggtgataaaaaagctttaacctatgtgctcctgctccctctttctcccctgtcaggacgatgccccgaattcccaccctgaagaacctagaggatcttgttactgaataccacgggaacttttcggtgagaacgctgtcataagcatgctgcagtctatcaactgccaactgcctgccagcaagacagacagagtgtgggggtgggggcagagaggagagggaaggaggccctgcactaactgtcaggatgtggccgaccaaatggggcatggactatacagagagagacacacacagaagtgcagattatagattgaatgaggcagatggcaactggtattgggggcccaggagcctgtgtatcccttctgtaatcaattacagtggttgcagacatcatgagtactcctttggcacagagctcggtcttttacttcctgcccctaattgacccctgacctggacatatctgtctttaggcctggagtggtgtgtctaagggactggctgagagtctgcagccagactacagtgaacgactctgcctcgtcagtgagattcccccaaaaggaggggcccttggggaggggcctggggcctccccatgcaaccagcatagcccctactgggcccccccatgttacaccctaaagcctgaaacctgaaccccaatcctctgacagaagaaccccagggtcctgtagccctaagtggtactaactttccttcattcaacccacctgcgtctcatactcacctcaccccactgtggctgatttggaattttgtgcccccatgtaagcaccccttcatttggcattccccacttgagaattacccttttgccccgaacatgtttttcttctccctcagtctggcccttccttttcgcaggattcttcctccctccctctttccctcccttcctctttccatctaccctccgattgttcctgaaccgatgagaaataaagtttctgttgataatcatcaaaaatgtctgtcatgggggtggggagcaggggaagcctgggatgcaatgagggtgggaggggaagaaaaaggagtagtacattcatgctgtggaggcatctaaaaaaataaaaaaaataaaaaaagcattattgactgatgcatgtaacctttttttttttttttttttttttcagttgaagtcggaagtttacatacaccttagtatagctg

SEQ ID NO: 420 - DNA, 257 bp, unidentified
  source 1..257: mol_type = other DNA
ctaaggtgtatgtaaacttccgacttcaactggtagtgtatttttttttttttttttatcatccagttgaagtcggaagtttacatacaccttagttttttttttttttttttttttggcgatcgcttttttttttttttttgctagaaagagtactgttctggaaactgacttttttttttttttttgcgatcgcctttttttttttttgatacatttctaaggtgtatgtaaacttccgacttcaactggatgat

SEQ ID NO: 421 - DNA, 260 bp, unidentified
  source 1..260: mol_type = other DNA
cacgtgcagttgaagtcggaagtttacatacaccttagtttctcgatcattattattttttggcgatcgcttttttttttttttttgttgagaatggtgctagtggtagtgaacagttttttttttttttttgcgatcgcctttttttttttttttttttttctaaggtgtatgtaaacttccgacttcaactgcacgtgttttttttttttttttttttgacgaatacagttgaagtcggaagtttacatacaccttag

SEQ ID NO: 422 - DNA, 4721 bp, unidentified
  source 1..4721: mol_type = other DNA
tacactaccagttgaagtcggaagtttacatacaccttagttttttttttttttttttttttggttacatgcatcagtcaataatgctttttttattttttttatttttttagatgcctccacagcatgaatgtactactcctttttcttcccctcccaccctcattgcatcccaggcttcccctgctccccacccccatgacagacatttttgatgattatcaacagaaactttatttctcatcggttcaggaacaatcggagggtagatggaaagaggaagggagggaaagagggagggaggaagaatcctgcgaaaaggaagggccagactgagggagaagaaaaacatgttcggggcaaaagggtaattctcaagtggggaatgccaaatgaaggggtgcttacatgggggcacaaaattccaaatcagccacagtggggtgaggtgagtatgagacgcaggtgggttgaatgaaggaaagttagtaccacttagggctacaggaccctggggttcttctgtcagaggattggggttcaggtttcaggctttagggtgtaacatgggggggcccagtaggggctatgctggttgcatggggaggccccaggcccctccccaagggcccctccttttgggggaatctcactgacgaggcagagtcgttcactgtagtctggctgcagactctcagccagtcccttagacacaccactccaggcctaaagacagatatgtccaggtcaggggtcaattaggggcaggaagtaaaagaccgagctctgtgccaaaggagtactcatgatgtctgcaaccactgtaattgattacagaagggatacacaggctcctgggcccccaataccagttgccatctgcctcattcaatctataatctgcacttctgtgtgtgtctctctctgtatagtccatgccccatttggtcggccacatcctgacagttagtgcagggcctccttccctctcctctctgcccccacccccacactctgtctgtcttgctggcaggcagttggcagttgatagactgcagcatgcttatgacagcgttctcaccgaaaagttcccgtggtattcagtaacaagatcctctaggttcttcagggtgggaattcggggcatcgtcctgacaggggagaaagagggagcaggagcacataggttaaagcttttttatcacccttctcccagttgtcccatatgaaataaagtgattctgtgttctctgtgcctgtggcttccttccatcaccaaaccctcttgggtaatctctcattacttactgtctcatcctttactcctaaagaccctgcaaaaccctcctctgctattgtcagctaccgttcccctcatttttctgggcttctccaaatctcaccgttccagccagaaatacacacagagaaggctgataatcaatcccatggagccaacagagataaccacggcttccaatgcaaacaggaaaggattctctatagaaaaaagaaaagcaaagtggaccttatatttgttgtgcccctactacatgccaggcactggtgccaggcaccgcgctaaagacatactctctgtttaatcctcacaacagctcctgtgaggcaggaacaattacctccatcttacatcttaggaaacagaatccaagagtttagggatgtggccaaggccaaagaggtagtatgtggcacagcctagatccagctggttccaaagccatcttcaccttgcaggctctctaggaatgcttcagggaaatcctatacattctatagcccccttgagtacccctcagcctccttctcaatccactcccctactctaacaacacgctaacccaaccctacacagaaaaaccttgatttctagaggttggggttagacagtgtggagagatggggcaccaagtttaggggctttagtgacagggaagtggagcaaaagacagtggtgttagaaaggctggggtgttgggctcatggattgggtcatgtgggcccattttaccttttgaagtattgctcccccagtggattgggtggctccattcactccaatgctgagcacttccacagagtgggttaaagcggctccgaacacgaaacgtgtagcgtttctgcccatccacactaggcaaggagaacttatgtctataatccactgattgttccttgaggagaaagaggatgagggaaagtgggtgtctatgagagaagggagaattaaaacatactcctgaacacccaccagtgtcatctctgctactgcccagtttctctctcatctcttgactactcaagccacactgctcccttcactgacttgaatctaatgcctcccctctggatccccttaatggcttccttttgtttacttgtctatctggtatcaggaagagtatgggtagggaatccctaatgaaaactcactggtgtcaggaatggtggctcacgcctgtaatcccagcactttgggaggccgaggtgggcagatcacctgaggtcaggagttcaagaccagcctgaccaacatggcaaaaccctgtctttactaaaaatacaaaaattagccaggcatggttgtgcatgctcccagctacttgggaggctgaagcaggagaatcacttgaaccagggagacagaggtcgcagtgagcccaagatcgccccactgcactcaagcctgggcaacagagtgaggctctgtctcaaaaaaaaaaaaaaaagaaagaaagaaagaaaagaaaagaaaaaaagaaaactcactggagaaaataggggggaaaggagttggaggagggagggtagggggtgagcagagaagctgggaggcagagaacaggagcttgatattaggtccttctatctgtctggttgaatcctttagccctactttcttggccttagctgctacattcacgtccctagtcactcacagtccagctgtggtcccagtcagtccggtactgcaccaagtgctccaaacagtggttcaagaatctgttgttccagttcagttctagctgggattcactcagtttgtgaagtgttaggttctctggagcccaggggatcactggagatatgtgtgcatatgtggtcattcccctggcctagacaagtcaggatcctgaaggtagtgcccctaatacctcctcccttcccatcatgatcccctacctcctcttttctgcccatgtacccttatgataaaagaacactactctgtagactccaatgtcccacagtatccctggtctcttgaccctttctttccaaattacccagattctgcagttttagcatctgtgtggcctgtctcctgggttcccgtgggtcctggagctgaacaacaaatgtttggtagaggtggatctcctttttttgcaactgacagccagaagtgatttcttcagagaatagatagtggctgcacttctggactttatcattatccgagttcttgtacctagaggagaaaggttggaaggaagaggaacagtggggccaatctgggtactgcagatatccagagcctagcctcatctcccctcaaccgacttatgacttaccccaggagaaaacagtggggtacctgggagacttgctaccctctctcttggtctctgatccaacccacctcttcttcatcccctccccctcgtcccttctcataccaataatgcagagtgaggttggtaggctggggctcagagctgctgttccaagtgcaattcatgtactcgacattgaacacaaaacactgaacctctgggaggggcagagtggaaacactgagggagtcagtgggcatagtggtcaggaagaaatctagattggggagaaaatgaaggcagggagggaaagagaaatgatggtcagaaggaggaggccaagcacggtggctcatgtctgtaatcctggtgctttgaaaggctgaggcaggaggatcactagaggccaggagtttgagaccagcctaggcaacatagtgagaccctgcctcaaaagaaagaaagaaacaaacaaacaagaaagaaagaaagaagaagtagcgtgaggcagggaaccctcccccttgcccttcccactccacttttcaattctgcccacatgattgtaatggccagtggcaggcaccagatctctgtacggccccttcccacagccacccttctcaccagccccctccagtcccagatttcccaccagctgtggtgtcttcattcccattgggcgtcagaattgtcgtgttcagccccactcccagcaggggcagctgcaggaataagagggatgtgaatggtaatgatggcttcaacatggcgcttgctcttcattccctgggtgtagtctgtctgtgtcaggaacctgggtccctcacccactacccctccccacccacacgtttcctctgtcatagcttccggtggaaagaaccttataaaccagggctttacagagggtgtggcaaatatgtgctgtgtgacacgggctaagtcctctaggagattaggtgctgctgtaaggtggtaaacagaaactaaagctggatatacaatagtgtcacagactcaaaaatcctcagcccacctagatcctgggaaggatctgttcactgcggccgcatgttctttttttttttttttttttttttctaaggtgtatgtaaacttccgacttcaactgtattcgtc

SEQ ID NO: 423 - DNA, 260 bp, unidentified
  source 1..260: mol_type = other DNA
cacgtgcagttgaagtcggaagtttacatacaccttagtttctcgatcattattattttttggcgatcgcttttttttttttttttagcaaattggtaatactcctgcctccacagttttttttttttttttgcgatcgcctttttttttttttttttttttctaaggtgtatgtaaacttccgacttcaactgcacgtgttttttttttttttttttttcagctatacagttgaagtcggaagtttacatacaccttag

SEQ ID NO: 424 - DNA, 257 bp, unidentified
  source 1..257: mol_type = other DNA
ctaaggtgtatgtaaacttccgacttcaactgagtatgaatttttttttttttttttatcatccagttgaagtcggaagtttacatacaccttagttttttttttttttttttttttggcgatcgcttttttttttttttttccttctcctctaaatcattaccttctataattttttttttttttttgcgatcgcctttttttttttttgatacatttctaaggtgtatgtaaacttccgacttcaactggatgat

SEQ ID NO: 425 - DNA, 4720 bp, unidentified
  source 1..4720: mol_type = other DNA
ttcatactcagttgaagtcggaagtttacatacaccttagttttttttttttttttttttttgaacatgcggccgcgtgaacagatccttcccaggatctaggtgggctgaggatttttgagtctgtgacactattgtatatccagctttagtttctgtttaccaccttacagcagcacctaatctcctagaggacttagcccgtgtcacacagcacatatttgccacaccctctgtaaagccctggtttataaggttctttccaccggaagctatgacagaggaaacgtgtgggtggggaggggtagtgggtgagggacccaggttcctgacacagacagactacacccagggaatgaagagcaagcgccatgttgaagccatcattaccattcacatccctcttattcctgcagctgcccctgctgggagtggggctgaacacgacaattctgacgcccaatgggaatgaagacaccacagctggtgggaaatctgggactggagggggctggtgagaagggtggctgtgggaaggggccgtacagagatctggtgcctgccactggccattacaatcatgtgggcagaattgaaaagtggagtgggaagggcaagggggagggttccctgcctcacgctacttcttctttctttctttcttgtttgtttgtttctttctttcttttgaggcagggtctcactatgttgcctaggctggtctcaaactcctggcctctagtgatcctcctgcctcagcctttcaaagcaccaggattacagacatgagccaccgtgcttggcctcctccttctgaccatcatttctctttccctccctgccttcattttctccccaatctagatttcttcctgaccactatgcccactgactccctcagtgtttccactctgcccctcccagaggttcagtgttttgtgttcaatgtcgagtacatgaattgcacttggaacagcagctctgagccccagcctaccaacctcactctgcattattggtatgagaagggacgagggggaggggatgaagaagaggtgggttggatcagagaccaagagagagggtagcaagtctcccaggtaccccactgttttctcctggggtaagtcataagtcggttgaggggagatgaggctaggctctggatatctgcagtacccagattggccccactgttcctcttccttccaacctttctcctctaggtacaagaactcggataatgataaagtccagaagtgcagccactatctattctctgaagaaatcacttctggctgtcagttgcaaaaaaaggagatccacctctaccaaacatttgttgttcagctccaggacccacgggaacccaggagacaggccacacagatgctaaaactgcagaatctgggtaatttggaaagaaagggtcaagagaccagggatactgtgggacattggagtctacagagtagtgttcttttatcataagggtacatgggcagaaaagaggaggtaggggatcatgatgggaagggaggaggtattaggggcactaccttcaggatcctgacttgtctaggccaggggaatgaccacatatgcacacatatctccagtgatcccctgggctccagagaacctaacacttcacaaactgagtgaatcccagctagaactgaactggaacaacagattcttgaaccactgtttggagcacttggtgcagtaccggactgactgggaccacagctggactgtgagtgactagggacgtgaatgtagcagctaaggccaagaaagtagggctaaaggattcaaccagacagatagaaggacctaatatcaagctcctgttctctgcctcccagcttctctgctcaccccctaccctccctcctccaactcctttcccccctattttctccagtgagttttctttttttcttttcttttctttctttctttcttttttttttttttttgagacagagcctcactctgttgcccaggcttgagtgcagtggggcgatcttgggctcactgcgacctctgtctccctggttcaagtgattctcctgcttcagcctcccaagtagctgggagcatgcacaaccatgcctggctaatttttgtatttttagtaaagacagggttttgccatgttggtcaggctggtcttgaactcctgacctcaggtgatctgcccacctcggcctcccaaagtgctgggattacaggcgtgagccaccattcctgacaccagtgagttttcattagggattccctacccatactcttcctgataccagatagacaagtaaacaaaaggaagccattaaggggatccagaggggaggcattagattcaagtcagtgaagggagcagtgtggcttgagtagtcaagagatgagagagaaactgggcagtagcagagatgacactggtgggtgttcaggagtatgttttaattctcccttctctcatagacacccactttccctcatcctctttctcctcaaggaacaatcagtggattatagacataagttctccttgcctagtgtggatgggcagaaacgctacacgtttcgtgttcggagccgctttaacccactctgtggaagtgctcagcattggagtgaatggagccacccaatccactgggggagcaatacttcaaaaggtaaaatgggcccacatgacccaatccatgagcccaacaccccagcctttctaacaccactgtcttttgctccacttccctgtcactaaagcccctaaacttggtgccccatctctccacactgtctaaccccaacctctagaaatcaaggtttttctgtgtagggttgggttagcgtgttgttagagtaggggagtggattgagaaggaggctgaggggtactcaagggggctatagaatgtataggatttccctgaagcattcctagagagcctgcaaggtgaagatggctttggaaccagctggatctaggctgtgccacatactacctctttggccttggccacatccctaaactcttggattctgtttcctaagatgtaagatggaggtaattgttcctgcctcacaggagctgttgtgaggattaaacagagagtatgtctttagcgcggtgcctggcaccagtgcctggcatgtagtaggggcacaacaaatataaggtccactttgcttttcttttttctatagagaatcctttcctgtttgcattggaagccgtggttatctctgttggctccatgggattgattatcagccttctctgtgtgtatttctggctggaacggtgagatttggagaagcccagaaaaatgaggggaacggtagctgacaatagcagaggagggttttgcagggtctttaggagtaaaggatgagacagtaagtaatgagagattacccaagagggtttggtgatggaaggaagccacaggcacagagaacacagaatcactttatttcatatgggacaactgggagaagggtgataaaaaagctttaacctatgtgctcctgctccctctttctcccctgtcaggacgatgccccgaattcccaccctgaagaacctagaggatcttgttactgaataccacgggaacttttcggtgagaacgctgtcataagcatgctgcagtctatcaactgccaactgcctgccagcaagacagacagagtgtgggggtgggggcagagaggagagggaaggaggccctgcactaactgtcaggatgtggccgaccaaatggggcatggactatacagagagagacacacacagaagtgcagattatagattgaatgaggcagatggcaactggtattgggggcccaggagcctgtgtatcccttctgtaatcaattacagtggttgcagacatcatgagtactcctttggcacagagctcggtcttttacttcctgcccctaattgacccctgacctggacatatctgtctttaggcctggagtggtgtgtctaagggactggctgagagtctgcagccagactacagtgaacgactctgcctcgtcagtgagattcccccaaaaggaggggcccttggggaggggcctggggcctccccatgcaaccagcatagcccctactgggcccccccatgttacaccctaaagcctgaaacctgaaccccaatcctctgacagaagaaccccagggtcctgtagccctaagtggtactaactttccttcattcaacccacctgcgtctcatactcacctcaccccactgtggctgatttggaattttgtgcccccatgtaagcaccccttcatttggcattccccacttgagaattacccttttgccccgaacatgtttttcttctccctcagtctggcccttccttttcgcaggattcttcctccctccctctttccctcccttcctctttccatctaccctccgattgttcctgaaccgatgagaaataaagtttctgttgataatcatcaaaaatgtctgtcatgggggtggggagcaggggaagcctgggatgcaatgagggtgggaggggaagaaaaaggagtagtacattcatgctgtggaggcatctaaaaaaataaaaaaaataaaaaaagcattattgactgatgcatgtaacctttttttttttttttttttttttctaaggtgtatgtaaacttccgacttcaactgtatagctg

SEQ ID NO: 426 - DNA, 251 bp, unidentified
  source 1..251: mol_type = other DNA
cagttgaagtcggaagtttacatacaccttaggtagtgtatttttttttttttttttatcatcctaaggtgtatgtaaacttccgacttcaactgttttttttttttttttttttttgcgaccttttttttttttttttgctagaaagagtactgttctggaaactgacttttttttttttttttggtcgctttttttttttttgatacatttcagttgaagtcggaagtttacatacaccttaggatgat

SEQ ID NO: 427 - DNA, 253 bp, unidentified
  source 1..253: mol_type = other DNA
cacgtgctaaggtgtatgtaaacttccgacttcaactgtttctcgatcattattattttttgcgaccttttttttttttttttgttgagaatggtgctagtggtagtgaacagtttttttttttttttggtcgctttttttttttttttttttttcagttgaagtcggaagtttacatacaccttagcacgtgttttttttttttttttttttgacgaatactaaggtgtatgtaaacttccgacttcaactg

SEQ ID NO: 428 - DNA, 4721 bp, unidentified; identical to SEQ ID NO: 416
  source 1..4721: mol_type = other DNA

SEQ ID NO: 429 - DNA, 254 bp, unidentified
  source 1..254: mol_type = other DNA
cacgtgctaaggtgtatgtaaacttccgacttcaactgtttctcgatcattattattttttgcgaccttttttttttttttttagcaaattggtaatactcctgcctccacagttttttttttttttttggtcgctttttttttttttttttttttcagttgaagtcggaagtttacatacaccttagcacgtgttttttttttttttttttttcagctatactaaggtgtatgtaaacttccgacttcaactg

SEQ ID NO: 430 - DNA, 251 bp, unidentified
  source 1..251: mol_type = other DNA
cagttgaagtcggaagtttacatacaccttagagtatgaatttttttttttttttttatcatcctaaggtgtatgtaaacttccgacttcaactgttttttttttttttttttttttgcgaccttttttttttttttttccttctcctctaaatcattaccttctataattttttttttttttttggtcgctttttttttttttgatacatttcagttgaagtcggaagtttacatacaccttaggatgat

SEQ ID NO: 431 - DNA, 4720 bp, unidentified; identical to SEQ ID NO: 419
  source 1..4720: mol_type = other DNA

SEQ ID NO: 432 - DNA, 251 bp, unidentified
  source 1..251: mol_type = other DNA
ctaaggtgtatgtaaacttccgacttcaactggtagtgtatttttttttttttttttatcatccagttgaagtcggaagtttacatacaccttagttttttttttttttttttttttgcgaccttttttttttttttttgctagaaagagtactgttctggaaactgacttttttttttttttttggtcgctttttttttttttgatacatttctaaggtgtatgtaaacttccgacttcaactggatgat

SEQ ID NO: 433 - DNA, 254 bp, unidentified
  source 1..254: mol_type = other DNA
cacgtgcagttgaagtcggaagtttacatacaccttagtttctcgatcattattattttttgcgaccttttttttttttttttgttgagaatggtgctagtggtagtgaacagttttttttttttttttggtcgctttttttttttttttttttttctaaggtgtatgtaaacttccgacttcaactgcacgtgttttttttttttttttttttgacgaatacagttgaagtcggaagtttacatacaccttag

SEQ ID NO: 434 - DNA, 4721 bp, unidentified; identical to SEQ ID NO: 422
  source 1..4721: mol_type = other DNA

SEQ ID NO: 435 - DNA, 254 bp, unidentified
  source 1..254: mol_type = other DNA
cacgtgcagttgaagtcggaagtttacatacaccttagtttctcgatcattattattttttgcgaccttttttttttttttttagcaaattggtaatactcctgcctccacagttttttttttttttttggtcgctttttttttttttttttttttctaaggtgtatgtaaacttccgacttcaactgcacgtgttttttttttttttttttttcagctatacagttgaagtcggaagtttacatacaccttag

SEQ ID NO: 436 - DNA, 251 bp, unidentified
  source 1..251: mol_type = other DNA
ctaaggtgtatgtaaacttccgacttcaactgagtatgaatttttttttttttttttatcatccagttgaagtcggaagtttacatacaccttagttttttttttttttttttttttgcgaccttttttttttttttttccttctcctctaaatcattaccttctataattttttttttttttttggtcgctttttttttttttgatacatttctaaggtgtatgtaaacttccgacttcaactggatgat

SEQ ID NO: 437 - DNA, 4720 bp, unidentified; identical to SEQ ID NO: 425
  source 1..4720: mol_type = other DNA

SEQ ID NO: 438 - DNA, 263 bp, unidentified
  source 1..263: mol_type = other DNA
cagttgaagtcggaagtttacatacaccttaggtagtgtatttttttttttttttttatcatcctaaggtgtatgtaaacttccgacttcaactgttttttttttttttttttttttgcggcgatcggcttttttttttttttttgctagaaagagtactgttctggaaactgacttttttttttttttttgccgatcgccgctttttttttttttgatacatttcagttgaagtcggaagtttacatacaccttaggatgat

SEQ ID NO: 439 - DNA, 266 bp, unidentified
  source 1..266: mol_type = other DNA
cacgtgctaaggtgtatgtaaacttccgacttcaactgtttctcgatcattattattttttgcggcgatcggcttttttttttttttttgttgagaatggtgctagtggtagtgaacagttttttttttttttttgccgatcgccgctttttttttttttttttttttcagttgaagtcggaagtttacatacaccttagcacgtgttttttttttttttttttttgacgaatactaaggtgtatgtaaacttccgacttcaactg

SEQ ID NO: 440 - DNA, 4721 bp, unidentified; identical to SEQ ID NO: 416
  source 1..4721: mol_type = other DNA

SEQ ID NO: 441 - DNA, 266 bp, unidentified
  source 1..266: mol_type = other DNA
cacgtgctaaggtgtatgtaaacttccgacttcaactgtttctcgatcattattattttttgcggcgatcggcttttttttttttttttagcaaattggtaatactcctgcctccacagttttttttttttttttgccgatcgccgctttttttttttttttttttttcagttgaagtcggaagtttacatacaccttagcacgtgttttttttttttttttttttcagctatactaaggtgtatgtaaacttccgacttcaactg

SEQ ID NO: 442 - DNA, 263 bp, unidentified
  source 1..263: mol_type = other DNA
cagttgaagtcggaagtttacatacaccttagagtatgaatttttttttttttttttatcatcctaaggtgtatgtaaacttccgacttcaactgttttttttttttttttttttttgcggcgatcggcttttttttttttttttccttctcctctaaatcattaccttctataattttttttttttttttgccgatcgccgctttttttttttttgatacatttcagttgaagtcggaagtttacatacaccttaggatgat

SEQ ID NO: 443 - DNA, 4720 bp, unidentified; identical to SEQ ID NO: 419
  source 1..4720: mol_type = other DNA

SEQ ID NO: 444 - DNA, 263 bp, unidentified
  source 1..263: mol_type = other DNA
ctaaggtgtatgtaaacttccgacttcaactggtagtgtatttttttttttttttttatcatccagttgaagtcggaagtttacatacaccttagttttttttttttttttttttttgcggcgatcggcttttttttttttttttgctagaaagagtactgttctggaaactgacttttttttttttttttgccgatcgccgctttttttttttttgatacatttctaaggtgtatgtaaacttccgacttcaactggatgat

SEQ ID NO: 445 - DNA, 266 bp, unidentified
  source 1..266: mol_type = other DNA
cacgtgcagttgaagtcggaagtttacatacaccttagtttctcgatcattattattttttgcggcgatcggcttttttttttttttttgttgagaatggtgctagtggtagtgaacagttttttttttttttttgccgatcgccgctttttttttttttttttttttctaaggtgtatgtaaacttccgacttcaactgcacgtgttttttttttttttttttttgacgaatacagttgaagtcggaagtttacatacaccttag

SEQ ID NO: 446 - DNA, 4721 bp, unidentified; identical to SEQ ID NO: 422
  source 1..4721: mol_type = other DNA

SEQ ID NO: 447 - DNA, 266 bp, unidentified
  source 1..266: mol_type = other DNA
cacgtgcagttgaagtcggaagtttacatacaccttagtttctcgatcattattattttttgcggcgatcggcttttttttttttttttagcaaattggtaatactcctgcctccacagttttttttttttttttgccgatcgccgctttttttttttttttttttttctaaggtgtatgtaaacttccgacttcaactgcacgtgttttttttttttttttttttcagctatacagttgaagtcggaagtttacatacaccttag

SEQ ID NO: 448 - DNA, 263 bp, unidentified
  source 1..263: mol_type = other DNA
ctaaggtgtatgtaaacttccgacttcaactgagtatgaatttttttttttttttttatcatccagttgaagtcggaagtttacatacaccttagttttttttttttttttttttttgcggcgatcggcttttttttttttttttccttctcctctaaatcattaccttctataattttttttttttttttgccgatcgccgctttttttttttttgatacatttctaaggtgtatgtaaacttccgacttcaactggatgat

SEQ ID NO: 449 - DNA, 4720 bp, unidentified; identical to SEQ ID NO: 425
  source 1..4720: mol_type = other DNA

SEQ ID NO: 450 - DNA, 284 bp, unidentified
  source 1..284: mol_type = other DNA
tgtggggggacaaaaaagtctcaaactggacaaaaaagatcgtagtgtatttttttttttttttttatcatcgatcttttttgtccagtttgagacttttttgtccgcccacattttttttttttttttttttttggcgatcgcttttttttttttttttgctagaaagagtactgttctggaaactgacttttttttttttttttgcgatcgcctttttttttttttgatacattttgtggggggacaaaaaagtctcaaactggacaaaaaagatcgatgat

SEQ ID NO: 451 - DNA, 287 bp, unidentified
  source 1..287: mol_type = other DNA
cacgtggatcttttttgtccagtttgagacttttttgtccgcccacatttctcgatcattattattttttggcgatcgcttttttttttttttttgttgagaatggtgctagtggtagtgaacagttttttttttttttttgcgatcgccttttttttttttttttttttttgtggggggacaaaaaagtctcaaactggacaaaaaagatccacgtgttttttttttttttttttttgacgaatagatcttttttgtccagtttgagacttttttgtccgcccaca

SEQ ID NO: 452 - DNA, 4739 bp, unidentified
  source 1..4739: mol_type = other DNA
tacactacgatcttttttgtccagtttgagacttttttgtccgcccacattttttttttttttttttttttggttacatgcatcagtcaataatgctttttttattttttttatttttttagatgcctccacagcatgaatgtactactcctttttcttcccctcccaccctcattgcatcccaggcttcccctgctccccacccccatgacagacatttttgatgattatcaacagaaactttatttctcatcggttcaggaacaatcggagggtagatggaaagaggaagggagggaaagagggagggaggaagaatcctgcgaaaaggaagggccagactgagggagaagaaaaacatgttcggggcaaaagggtaattctcaagtggggaatgccaaatgaaggggtgcttacatgggggcacaaaattccaaatcagccacagtggggtgaggtgagtatgagacgcaggtgggttgaatgaaggaaagttagtaccacttagggctacaggaccctggggttcttctgtcagaggattggggttcaggtttcaggctttagggtgtaacatgggggggcccagtaggggctatgctggttgcatggggaggccccaggcccctccccaagggcccctccttttgggggaatctcactgacgaggcagagtcgttcactgtagtctggctgcagactctcagccagtcccttagacacaccactccaggcctaaagacagatatgtccaggtcaggggtcaattaggggcaggaagtaaaagaccgagctctgtgccaaaggagtactcatgatgtctgcaaccactgtaattgattacagaagggatacacaggctcctgggcccccaataccagttgccatctgcctcattcaatctataatctgcacttctgtgtgtgtctctctctgtatagtccatgccccatttggtcggccacatcctgacagttagtgcagggcctccttccctctcctctctgcccccacccccacactctgtctgtcttgctggcaggcagttggcagttgatagactgcagcatgcttatgacagcgttctcaccgaaaagttcccgtggtattcagtaacaagatcctctaggttcttcagggtgggaattcggggcatcgtcctgacaggggagaaagagggagcaggagcacataggttaaagcttttttatcacccttctcccagttgtcccatatgaaataaagtgattctgtgttctctgtgcctgtggcttccttccatcaccaaaccctcttgggtaatctctcattacttactgtctcatcctttactcctaaagaccctgcaaaaccctcctctgctattgtcagctaccgttcccctcatttttctgggcttctccaaatctcaccgttccagccagaaatacacacagagaaggctgataatcaatcccatggagccaacagagataaccacggcttccaatgcaaacaggaaaggattctctatagaaaaaagaaaagcaaagtggaccttatatttgttgtgcccctactacatgccaggcactggtgccaggcaccgcgctaaagacatactctctgtttaatcctcacaacagctcctgtgaggcaggaacaattacctccatcttacatcttaggaaacagaatccaagagtttagggatgtggccaaggccaaagaggtagtatgtggcacagcctagatccagctggttccaaagccatcttcaccttgcaggctctctaggaatgcttcagggaaatcctatacattctatagcccccttgagtacccctcagcctccttctcaatccactcccctactctaacaacacgctaacccaaccctacacagaaaaaccttgatttctagaggttggggttagacagtgtggagagatggggcaccaagtttaggggctttagtgacagggaagtggagcaaaagacagtggtgttagaaaggctggggtgttgggctcatggattgggtcatgtgggcccattttaccttttgaagtattgctcccccagtggattgggtggctccattcactccaatgctgagcacttccacagagtgggttaaagcggctccgaacacgaaacgtgtagcgtttctgcccatccacactaggcaaggagaacttatgtctataatccactgattgttccttgaggagaaagaggatgagggaaagtgggtgtctatgagagaagggagaattaaaacatactcctgaacacccaccagtgtcatctctgctactgcccagtttctctctcatctcttgactactcaagccacactgctcccttcactgacttgaatctaatgcctcccctctggatccccttaatggcttccttttgtttacttgtctatctggtatcaggaagagtatgggtagggaatccctaatgaaaactcactggtgtcaggaatggtggctcacgcctgtaatcccagcactttgggaggccgaggtgggcagatcacctgaggtcaggagttcaagaccagcctgaccaacatggcaaaaccctgtctttactaaaaatacaaaaattagccaggcatggttgtgcatgctcccagctacttgggaggctgaagcaggagaatcacttgaaccagggagacagaggtcgcagtgagcccaagatcgccccactgcactcaagcctgggcaacagagtgaggctctgtctcaaaaaaaaaaaaaaaagaaagaaagaaagaaaagaaaagaaaaaaagaaaactcactggagaaaataggggggaaaggagttggaggagggagggtagggggtgagcagagaagctgggaggcagagaacaggagcttgatattaggtccttctatctgtctggttgaatcctttagccctactttcttggccttagctgctacattcacgtccctagtcactcacagtccagctgtggtcccagtcagtccggtactgcaccaagtgctccaaacagtggttcaagaatctgttgttccagttcagttctagctgggattcactcagtttgtgaagtgttaggttctctggagcccaggggatcactggagatatgtgtgcatatgtggtcattcccctggcctagacaagtcaggatcctgaaggtagtgcccctaatacctcctcccttcccatcatgatcccctacctcctcttttctgcccatgtacccttatgataaaagaacactactctgtagactccaatgtcccacagtatccctggtctcttgaccctttctttccaaattacccagattctgcagttttagcatctgtgtggcctgtctcctgggttcccgtgggtcctggagctgaacaacaaatgtttggtagaggtggatctcctttttttgcaactgacagccagaagtgatttcttcagagaatagatagtggctgcacttctggactttatcattatccgagttcttgtacctagaggagaaaggttggaaggaagaggaacagtggggccaatctgggtactgcagatatccagagcctagcctcatctcccctcaaccgacttatgacttaccccaggagaaaacagtggggtacctgggagacttgctaccctctctcttggtctctgatccaacccacctcttcttcatcccctccccctcgtcccttctcataccaataatgcagagtgaggttggtaggctggggctcagagctgctgttccaagtgcaattcatgtactcgacattgaacacaaaacactgaacctctgggaggggcagagtggaaacactgagggagtcagtgggcatagtggtcaggaagaaatctagattggggagaaaatgaaggcagggagggaaagagaaatgatggtcagaaggaggaggccaagcacggtggctcatgtctgtaatcctggtgctttgaaaggctgaggcaggaggatcactagaggccaggagtttgagaccagcctaggcaacatagtgagaccctgcctcaaaagaaagaaagaaacaaacaaacaagaaagaaagaaagaagaagtagcgtgaggcagggaaccctcccccttgcccttcccactccacttttcaattctgcccacatgattgtaatggccagtggcaggcaccagatctctgtacggccccttcccacagccacccttctcaccagccccctccagtcccagatttcccaccagctgtggtgtcttcattcccattgggcgtcagaattgtcgtgttcagccccactcccagcaggggcagctgcaggaataagagggatgtgaatggtaatgatggcttcaacatggcgcttgctcttcattccctgggtgtagtctgtctgtgtcaggaacctgggtccctcacccactacccctccccacccacacgtttcctctgtcatagcttccggtggaaagaaccttataaaccagggctttacagagggtgtggcaaatatgtgctgtgtgacacgggctaagtcctctaggagattaggtgctgctgtaaggtggtaaacagaaactaaagctggatatacaatagtgtcacagactcaaaaatcctcagcccacctagatcctgggaaggatctgttcactgcggccgcatgttcttttttttttttttttttttttttgtggggggacaaaaaagtctcaaactggacaaaaaagatctattcgtc

SEQ ID NO: 453 - DNA, 287 bp, unidentified
  source 1..287: mol_type = other DNA
cacgtggatcttttttgtccagtttgagacttttttgtccgcccacatttctcgatcattattattttttggcgatcgcttttttttttttttttagcaaattggtaatactcctgcctccacagttttttttttttttttgcgatcgccttttttttttttttttttttttgtggggggacaaaaaagtctcaaactggacaaaaaagatccacgtgttttttttttttttttttttcagctatagatcttttttgtccagtttgagacttttttgtccgcccaca

SEQ ID NO: 454 - DNA, 284 bp, unidentified
  source 1..284: mol_type = other DNA
tgtggggggacaaaaaagtctcaaactggacaaaaaagatcagtatgaatttttttttttttttttatcatcgatcttttttgtccagtttgagacttttttgtccgcccacattttttttttttttttttttttggcgatcgcttttttttttttttttccttctcctctaaatcattaccttctataattttttttttttttttgcgatcgcctttttttttttttgatacattttgtggggggacaaaaaagtctcaaactggacaaaaaagatcgatgat

SEQ ID NO: 455 - DNA, 4738 bp, unidentified
  source 1..4738: mol_type = other DNA
ttcatactgatcttttttgtccagtttgagacttttttgtccgcccacattttttttttttttttttttttgaacatgcggccgcgtgaacagatccttcccaggatctaggtgggctgaggatttttgagtctgtgacactattgtatatccagctttagtttctgtttaccaccttacagcagcacctaatctcctagaggacttagcccgtgtcacacagcacatatttgccacaccctctgtaaagccctggtttataaggttctttccaccggaagctatgacagaggaaacgtgtgggtggggaggggtagtgggtgagggacccaggttcctgacacagacagactacacccagggaatgaagagcaagcgccatgttgaagccatcattaccattcacatccctcttattcctgcagctgcccctgctgggagtggggctgaacacgacaattctgacgcccaatgggaatgaagacaccacagctggtgggaaatctgggactggagggggctggtgagaagggtggctgtgggaaggggccgtacagagatctggtgcctgccactggccattacaatcatgtgggcagaattgaaaagtggagtgggaagggcaagggggagggttccctgcctcacgctacttcttctttctttctttcttgtttgtttgtttctttctttcttttgaggcagggtctcactatgttgcctaggctggtctcaaactcctggcctctagtgatcctcctgcctcagcctttcaaagcaccaggattacagacatgagccaccgtgcttggcctcctccttctgaccatcatttctctttccctccctgccttcattttctccccaatctagatttcttcctgaccactatgcccactgactccctcagtgtttccactctgcccctcccagaggttcagtgttttgtgttcaatgtcgagtacatgaattgcacttggaacagcagctctgagccccagcctaccaacctcactctgcattattggtatgagaagggacgagggggaggggatgaagaagaggtgggttggatcagagaccaagagagagggtagcaagtctcccaggtaccccactgttttctcctggggtaagtcataagtcggttgaggggagatgaggctaggctctggatatctgcagtacccagattggccccactgttcctcttccttccaacctttctcctctaggtacaagaactcggataatgataaagtccagaagtgcagccactatctattctctgaagaaatcacttctggctgtcagttgcaaaaaaaggagatccacctctaccaaacatttgttgttcagctccaggacccacgggaacccaggagacaggccacacagatgctaaaactgcagaatctgggtaatttggaaagaaagggtcaagagaccagggatactgtgggacattggagtctacagagtagtgttcttttatcataagggtacatgggcagaaaagaggaggtaggggatcatgatgggaagggaggaggtattaggggcactaccttcaggatcctgacttgtctaggccaggggaatgaccacatatgcacacatatctccagtgatcccctgggctccagagaacctaacacttcacaaactgagtgaatcccagctagaactgaactggaacaacagattcttgaaccactgtttggagcacttggtgcagtaccggactgactgggaccacagctggactgtgagtgactagggacgtgaatgtagcagctaaggccaagaaagtagggctaaaggattcaaccagacagatagaaggacctaatatcaagctcctgttctctgcctcccagcttctctgctcaccccctaccctccctcctccaactcctttcccccctattttctccagtgagttttctttttttcttttcttttctttctttctttcttttttttttttttttgagacagagcctcactctgttgcccaggcttgagtgcagtggggcgatcttgggctcactgcgacctctgtctccctggttcaagtgattctcctgcttcagcctcccaagtagctgggagcatgcacaaccatgcctggctaatttttgtatttttagtaaagacagggttttgccatgttggtcaggctggtcttgaactcctgacctcaggtgatctgcccacctcggcctcccaaagtgctgggattacaggcgtgagccaccattcctgacaccagtgagttttcattagggattccctacccatactcttcctgataccagatagacaagtaaacaaaaggaagccattaaggggatccagaggggaggcattagattcaagtcagtgaagggagcagtgtggcttgagtagtcaagagatgagagagaaactgggcagtagcagagatgacactggtgggtgttcaggagtatgttttaattctcccttctctcatagacacccactttccctcatcctctttctcctcaaggaacaatcagtggattatagacataagttctccttgcctagtgtggatgggcagaaacgctacacgtttcgtgttcggagccgctttaacccactctgtggaagtgctcagcattggagtgaatggagccacccaatccactgggggagcaatacttcaaaaggtaaaatgggcccacatgacccaatccatgagcccaacaccccagcctttctaacaccactgtcttttgctccacttccctgtcactaaagcccctaaacttggtgccccatctctccacactgtctaaccccaacctctagaaatcaaggtttttctgtgtagggttgggttagcgtgttgttagagtaggggagtggattgagaaggaggctgaggggtactcaagggggctatagaatgtataggatttccctgaagcattcctagagagcctgcaaggtgaagatggctttggaaccagctggatctaggctgtgccacatactacctctttggccttggccacatccctaaactcttggattctgtttcctaagatgtaagatggaggtaattgttcctgcctcacaggagctgttgtgaggattaaacagagagtatgtctttagcgcggtgcctggcaccagtgcctggcatgtagtaggggcacaacaaatataaggtccactttgcttttcttttttctatagagaatcctttcctgtttgcattggaagccgtggttatctctgttggctccatgggattgattatcagccttctctgtgtgtatttctggctggaacggtgagatttggagaagcccagaaaaatgaggggaacggtagctgacaatagcagaggagggttttgcagggtctttaggagtaaaggatgagacagtaagtaatgagagattacccaagagggtttggtgatggaaggaagccacaggcacagagaacacagaatcactttatttcatatgggacaactgggagaagggtgataaaaaagctttaacctatgtgctcctgctccctctttctcccctgtcaggacgatgccccgaattcccaccctgaagaacctagaggatcttgttactgaataccacgggaacttttcggtgagaacgctgtcataagcatgctgcagtctatcaactgccaactgcctgccagcaagacagacagagtgtgggggtgggggcagagaggagagggaaggaggccctgcactaactgtcaggatgtggccgaccaaatggggcatggactatacagagagagacacacacagaagtgcagattatagattgaatgaggcagatggcaactggtattgggggcccaggagcctgtgtatcccttctgtaatcaattacagtggttgcagacatcatgagtactcctttggcacagagctcggtcttttacttcctgcccctaattgacccctgacctggacatatctgtctttaggcctggagtggtgtgtctaagggactggctgagagtctgcagccagactacagtgaacgactctgcctcgtcagtgagattcccccaaaaggaggggcccttggggaggggcctggggcctccccatgcaaccagcatagcccctactgggcccccccatgttacaccctaaagcctgaaacctgaaccccaatcctctgacagaagaaccccagggtcctgtagccctaagtggtactaactttccttcattcaacccacctgcgtctcatactcacctcaccccactgtggctgatttggaattttgtgcccccatgtaagcaccccttcatttggcattccccacttgagaattacccttttgccccgaacatgtttttcttctccctcagtctggcccttccttttcgcaggattcttcctccctccctctttccctcccttcctctttccatctaccctccgattgttcctgaaccgatgagaaataaagtttctgttgataatcatcaaaaatgtctgtcatgggggtggggagcaggggaagcctgggatgcaatgagggtgggaggggaagaaaaaggagtagtacattcatgctgtggaggcatctaaaaaaataaaaaaaataaaaaaagcattattgactgatgcatgtaaccttttttttttttttttttttttttgtggggggacaaaaaagtctcaaactggacaaaaaagatctatagctg

SEQ ID NO: 456 - DNA, 284 bp, unidentified
  source 1..284: mol_type = other DNA
gatcttttttgtccagtttgagacttttttgtccgcccacagtagtgtatttttttttttttttttatcatctgtggggggacaaaaaagtctcaaactggacaaaaaagatcttttttttttttttttttttttggcgatcgcttttttttttttttttgctagaaagagtactgttctggaaactgacttttttttttttttttgcgatcgcctttttttttttttgatacatttgatcttttttgtccagtttgagacttttttgtccgcccacagatgat

SEQ ID NO: 457 - DNA, 287 bp, unidentified
  source 1..287: mol_type = other DNA
cacgtgtgtggggggacaaaaaagtctcaaactggacaaaaaagatctttctcgatcattattattttttggcgatcgcttttttttttttttttgttgagaatggtgctagtggtagtgaacagttttttttttttttttgcgatcgcctttttttttttttttttttttgatcttttttgtccagtttgagacttttttgtccgcccacacacgtgttttttttttttttttttttgacgaatatgtggggggacaaaaaagtctcaaactggacaaaaaagatc

SEQ ID NO: 458 - DNA, 4739 bp, unidentified
  source 1..4739: mol_type = other DNA
tacactactgtggggggacaaaaaagtctcaaactggacaaaaaagatcttttttttttttttttttttttggttacatgcatcagtcaataatgctttttttattttttttatttttttagatgcctccacagcatgaatgtactactcctttttcttcccctcccaccctcattgcatcccaggcttcccctgctccccacccccatgacagacatttttgatgattatcaacagaaactttatttctcatcggttcaggaacaatcggagggtagatggaaagaggaagggagggaaagagggagggaggaagaatcctgcgaaaaggaagggccagactgagggagaagaaaaacatgttcggggcaaaagggtaattctcaagtggggaatgccaaatgaaggggtgcttacatgggggcacaaaattccaaatcagccacagtggggtgaggtgagtatgagacgcaggtgggttgaatgaaggaaagttagtaccacttagggctacaggaccctggggttcttctgtcagaggattggggttcaggtttcaggctttagggtgtaacatgggggggcccagtaggggctatgctggttgcatggggaggccccaggcccctccccaagggcccctccttttgggggaatctcactgacgaggcagagtcgttcactgtagtctggctgcagactctcagccagtcccttagacacaccactccaggcctaaagacagatatgtccaggtcaggggtcaattaggggcaggaagtaaaagaccgagctctgtgccaaaggagtactcatgatgtctgcaaccactgtaattgattacagaagggatacacaggctcctgggcccccaataccagttgccatctgcctcattcaatctataatctgcacttctgtgtgtgtctctctctgtatagtccatgccccatttggtcggccacatcctgacagttagtgcagggcctccttccctctcctctctgcccccacccccacactctgtctgtcttgctggcaggcagttggcagttgatagactgcagcatgcttatgacagcgttctcaccgaaaagttcccgtggtattcagtaacaagatcctctaggttcttcagggtgggaattcggggcatcgtcctgacaggggagaaagagggagcaggagcacataggttaaagcttttttatcacccttctcccagttgtcccatatgaaataaagtgattctgtgttctctgtgcctgtggcttccttccatcaccaaaccctcttgggtaatctctcattacttactgtctcatcctttactcctaaagaccctgcaaaaccctcctctgctattgtcagctaccgttcccctcatttttctgggcttctccaaatctcaccgttccagccagaaatacacacagagaaggctgataatcaatcccatggagccaacagagataaccacggcttccaatgcaaacaggaaaggattctctatagaaaaaagaaaagcaaagtggaccttatatttgttgtgcccctactacatgccaggcactggtgccaggcaccgcgctaaagacatactctctgtttaatcctcacaacagctcctgtgaggcaggaacaattacctccatcttacatcttaggaaacagaatccaagagtttagggatgtggccaaggccaaagaggtagtatgtggcacagcctagatccagctggttccaaagccatcttcaccttgcaggctctctaggaatgcttcagggaaatcctatacattctatagcccccttgagtacccctcagcctccttctcaatccactcccctactctaacaacacgctaacccaaccctacacagaaaaaccttgatttctagaggttggggttagacagtgtggagagatggggcaccaagtttaggggctttagtgacagggaagtggagcaaaagacagtggtgttagaaaggctggggtgttgggctcatggattgggtcatgtgggcccattttaccttttgaagtattgctcccccagtggattgggtggctccattcactccaatgctgagcacttccacagagtgggttaaagcggctccgaacacgaaacgtgtagcgtttctgcccatccacactaggcaaggagaacttatgtctataatccactgattgttccttgaggagaaagaggatgagggaaagtgggtgtctatgagagaagggagaattaaaacatactcctgaacacccaccagtgtcatctctgctactgcccagtttctctctcatctcttgactactcaagccacactgctcccttcactgacttgaatctaatgcctcccctctggatccccttaatggcttccttttgtttacttgtctatctggtatcaggaagagtatgggtagggaatccctaatgaaaactcactggtgtcaggaatggtggctcacgcctgtaatcccagcactttgggaggccgaggtgggcagatcacctgaggtcaggagttcaagaccagcctgaccaacatggcaaaaccctgtctttactaaaaatacaaaaattagccaggcatggttgtgcatgctcccagctacttgggaggctgaagcaggagaatcacttgaaccagggagacagaggtcgcagtgagcccaagatcgccccactgcactcaagcctgggcaacagagtgaggctctgtctcaaaaaaaaaaaaaaaagaaagaaagaaagaaaagaaaagaaaaaaagaaaactcactggagaaaataggggggaaaggagttggaggagggagggtagggggtgagcagagaagctgggaggcagagaacaggagcttgatattaggtccttctatctgtctggttgaatcctttagccctactttcttggccttagctgctacattcacgtccctagtcactcacagtccagctgtggtcccagtcagtccggtactgcaccaagtgctccaaacagtggttcaagaatctgttgttccagttcagttctagctgggattcactcagtttgtgaagtgttaggttctctggagcccaggggatcactggagatatgtgtgcatatgtggtcattcccctggcctagacaagtcaggatcctgaaggtagtgcccctaatacctcctcccttcccatcatgatcccctacctcctcttttctgcccatgtacccttatgataaaagaacactactctgtagactccaatgtcccacagtatccctggtctcttgaccctttctttccaaattacccagattctgcagttttagcatctgtgtggcctgtctcctgggttcccgtgggtcctggagctgaacaacaaatgtttggtagaggtggatctcctttttttgcaactgacagccagaagtgatttcttcagagaatagatagtggctgcacttctggactttatcattatccgagttcttgtacctagaggagaaaggttggaaggaagaggaacagtggggccaatctgggtactgcagatatccagagcctagcctcatctcccctcaaccgacttatgacttaccccaggagaaaacagtggggtacctgggagacttgctaccctctctcttggtctctgatccaacccacctcttcttcatcccctccccctcgtcccttctcataccaataatgcagagtgaggttggtaggctggggctcagagctgctgttccaagtgcaattcatgtactcgacattgaacacaaaacactgaacctctgggaggggcagagtggaaacactgagggagtcagtgggcatagtggtcaggaagaaatctagattggggagaaaatgaaggcagggagggaaagagaaatgatggtcagaaggaggaggccaagcacggtggctcatgtctgtaatcctggtgctttgaaaggctgaggcaggaggatcactagaggccaggagtttgagaccagcctaggcaacatagtgagaccctgcctcaaaagaaagaaagaaacaaacaaacaagaaagaaagaaagaagaagtagcgtgaggcagggaaccctcccccttgcccttcccactccacttttcaattctgcccacatgattgtaatggccagtggcaggcaccagatctctgtacggccccttcccacagccacccttctcaccagccccctccagtcccagatttcccaccagctgtggtgtcttcattcccattgggcgtcagaattgtcgtgttcagccccactcccagcaggggcagctgcaggaataagagggatgtgaatggtaatgatggcttcaacatggcgcttgctcttcattccctgggtgtagtctgtctgtgtcaggaacctgggtccctcacccactacccctccccacccacacgtttcctctgtcatagcttccggtggaaagaaccttataaaccagggctttacagagggtgtggcaaatatgtgctgtgtgacacgggctaagtcctctaggagattaggtgctgctgtaaggtggtaaacagaaactaaagctggatatacaatagtgtcacagactcaaaaatcctcagcccacctagatcctgggaaggatctgttcactgcggccgcatgttctttttttttttttttttttttttgatcttttttgtccagtttgagacttttttgtccgcccacatattcgtc

SEQ ID NO: 459 - DNA, 287 bp, unidentified
  source 1..287: mol_type = other DNA
cacgtgtgtggggggacaaaaaagtctcaaactggacaaaaaagatctttctcgatcattattattttttggcgatcgcttttttttttttttttagcaaattggtaatactcctgcctccacagttttttttttttttttgcgatcgcctttttttttttttttttttttgatcttttttgtccagtttgagacttttttgtccgcccacacacgtgttttttttttttttttttttcagctatatgtggggggacaaaaaagtctcaaactggacaaaaaagatc

SEQ ID NO: 460 - DNA, 284 bp, unidentified
  source 1..284: mol_type = other DNA
gatcttttttgtccagtttgagacttttttgtccgcccacaagtatgaatttttttttttttttttatcatctgtggggggacaaaaaagtctcaaactggacaaaaaagatcttttttttttttttttttttttggcgatcgcttttttttttttttttccttctcctctaaatcattaccttctataattttttttttttttttgcgatcgcctttttttttttttgatacatttgatcttttttgtccagtttgagacttttttgtccgcccacagatgat

SEQ ID NO: 461 - DNA, 4738 bp, unidentified
  source 1..4738: mol_type = other DNA
ttcatacttgtggggggacaaaaaagtctcaaactggacaaaaaagatcttttttttttttttttttttttgaacatgcggccgcgtgaacagatccttcccaggatctaggtgggctgaggatttttgagtctgtgacactattgtatatccagctttagtttctgtttaccaccttacagcagcacctaatctcctagaggacttagcccgtgtcacacagcacatatttgccacaccctctgtaaagccctggtttataaggttctttccaccggaagctatgacagaggaaacgtgtgggtggggaggggtagtgggtgagggacccaggttcctgacacagacagactacacccagggaatgaagagcaagcgccatgttgaagccatcattaccattcacatccctcttattcctgcagctgcccctgctgggagtggggctgaacacgacaattctgacgcccaatgggaatgaagacaccacagctggtgggaaatctgggactggagggggctggtgagaagggtggctgtgggaaggggccgtacagagatctggtgcctgccactggccattacaatcatgtgggcagaattgaaaagtggagtgggaagggcaagggggagggttccctgcctcacgctacttcttctttctttctttcttgtttgtttgtttctttctttcttttgaggcagggtctcactatgttgcctaggctggtctcaaactcctggcctctagtgatcctcctgcctcagcctttcaaagcaccaggattacagacatgagccaccgtgcttggcctcctccttctgaccatcatttctctttccctccctgccttcattttctccccaatctagatttcttcctgaccactatgcccactgactccctcagtgtttccactctgcccctcccagaggttcagtgttttgtgttcaatgtcgagtacatgaattgcacttggaacagcagctctgagccccagcctaccaacctcactctgcattattggtatgagaagggacgagggggaggggatgaagaagaggtgggttggatcagagaccaagagagagggtagcaagtctcccaggtaccccactgttttctcctggggtaagtcataagtcggttgaggggagatgaggctaggctctggatatctgcagtacccagattggccccactgttcctcttccttccaacctttctcctctaggtacaagaactcggataatgataaagtccagaagtgcagccactatctattctctgaagaaatcacttctggctgtcagttgcaaaaaaaggagatccacctctaccaaacatttgttgttcagctccaggacccacgggaacccaggagacaggccacacagatgctaaaactgcagaatctgggtaatttggaaagaaagggtcaagagaccagggatactgtgggacattggagtctacagagtagtgttcttttatcataagggtacatgggcagaaaagaggaggtaggggatcatgatgggaagggaggaggtattaggggcactaccttcaggatcctgacttgtctaggccaggggaatgaccacatatgcacacatatctccagtgatcccctgggctccagagaacctaacacttcacaaactgagtgaatcccagctagaactgaactggaacaacagattcttgaaccactgtttggagcacttggtgcagtaccggactgactgggaccacagctggactgtgagtgactagggacgtgaatgtagcagctaaggccaagaaagtagggctaaaggattcaaccagacagatagaaggacctaatatcaagctcctgttctctgcctcccagcttctctgctcaccccctaccctccctcctccaactcctttcccccctattttctccagtgagttttctttttttcttttcttttctttctttctttcttttttttttttttttgagacagagcctcactctgttgcccaggcttgagtgcagtggggcgatcttgggctcactgcgacctctgtctccctggttcaagtgattctcctgcttcagcctcccaagtagctgggagcatgcacaaccatgcctggctaatttttgtatttttagtaaagacagggttttgccatgttggtcaggctggtcttgaactcctgacctcaggtgatctgcccacctcggcctcccaaagtgctgggattacaggcgtgagccaccattcctgacaccagtgagttttcattagggattccctacccatactcttcctgataccagatagacaagtaaacaaaaggaagccattaaggggatccagaggggaggcattagattcaagtcagtgaagggagcagtgtggcttgagtagtcaagagatgagagagaaactgggcagtagcagagatgacactggtgggtgttcaggagtatgttttaattctcccttctctcatagacacccactttccctcatcctctttctcctcaaggaacaatcagtggattatagacataagttctccttgcctagtgtggatgggcagaaacgctacacgtttcgtgttcggagccgctttaacccactctgtggaagtgctcagcattggagtgaatggagccacccaatccactgggggagcaatacttcaaaaggtaaaatgggcccacatgacccaatccatgagcccaacaccccagcctttctaacaccactgtcttttgctccacttccctgtcactaaagcccctaaacttggtgccccatctctccacactgtctaaccccaacctctagaaatcaaggtttttctgtgtagggttgggttagcgtgttgttagagtaggggagtggattgagaaggaggctgaggggtactcaagggggctatagaatgtataggatttccctgaagcattcctagagagcctgcaaggtgaagatggctttggaaccagctggatctaggctgtgccacatactacctctttggccttggccacatccctaaactcttggattctgtttcctaagatgtaagatggaggtaattgttcctgcctcacaggagctgttgtgaggattaaacagagagtatgtctttagcgcggtgcctggcaccagtgcctggcatgtagtaggggcacaacaaatataaggtccactttgcttttcttttttctatagagaatcctttcctgtttgcattggaagccgtggttatctctgttggctccatgggattgattatcagccttctctgtgtgtatttctggctggaacggtgagatttggagaagcccagaaaaatgaggggaacggtagctgacaatagcagaggagggttttgcagggtctttaggagtaaaggatgagacagtaagtaatgagagattacccaagagggtttggtgatggaaggaagccacaggcacagagaacacagaatcactttatttcatatgggacaactgggagaagggtgataaaaaagctttaacctatgtgctcctgctccctctttctcccctgtcaggacgatgccccgaattcccaccctgaagaacctagaggatcttgttactgaataccacgggaacttttcggtgagaacgctgtcataagcatgctgcagtctatcaactgccaactgcctgccagcaagacagacagagtgtgggggtgggggcagagaggagagggaaggaggccctgcactaactgtcaggatgtggccgaccaaatggggcatggactatacagagagagacacacacagaagtgcagattatagattgaatgaggcagatggcaactggtattgggggcccaggagcctgtgtatcccttctgtaatcaattacagtggttgcagacatcatgagtactcctttggcacagagctcggtcttttacttcctgcccctaattgacccctgacctggacatatctgtctttaggcctggagtggtgtgtctaagggactggctgagagtctgcagccagactacagtgaacgactctgcctcgtcagtgagattcccccaaaaggaggggcccttggggaggggcctggggcctccccatgcaaccagcatagcccctactgggcccccccatgttacaccctaaagcctgaaacctgaaccccaatcctctgacagaagaaccccagggtcctgtagccctaagtggtactaactttccttcattcaacccacctgcgtctcatactcacctcaccccactgtggctgatttggaattttgtgcccccatgtaagcaccccttcatttggcattccccacttgagaattacccttttgccccgaacatgtttttcttctccctcagtctggcccttccttttcgcaggattcttcctccctccctctttccctcccttcctctttccatctaccctccgattgttcctgaaccgatgagaaataaagtttctgttgataatcatcaaaaatgtctgtcatgggggtggggagcaggggaagcctgggatgcaatgagggtgggaggggaagaaaaaggagtagtacattcatgctgtggaggcatctaaaaaaataaaaaaaataaaaaaagcattattgactgatgcatgtaacctttttttttttttttttttttttgatcttttttgtccagtttgagacttttttgtccgcccacatatagctg

SEQ ID NO: 462 - DNA, 278 bp, unidentified
  source 1..278: mol_type = other DNA
tgtggggggacaaaaaagtctcaaactggacaaaaaagatcgtagtgtatttttttttttttttttatcatcgatcttttttgtccagtttgagacttttttgtccgcccacattttttttttttttttttttttgcgaccttttttttttttttttgctagaaagagtactgttctggaaactgacttttttttttttttttggtcgctttttttttttttgatacattttgtggggggacaaaaaagtctcaaactggacaaaaaagatcgatgat

SEQ ID NO: 463 - DNA, 280 bp, unidentified
  source 1..280: mol_type = other DNA
cacgtggatcttttttgtccagtttgagacttttttgtccgcccacatttctcgatcattattattttttgcgaccttttttttttttttttgttgagaatggtgctagtggtagtgaacagtttttttttttttttggtcgcttttttttttttttttttttttgtggggggacaaaaaagtctcaaactggacaaaaaagatccacgtgttttttttttttttttttttgacgaatagatcttttttgtccagtttgagacttttttgtccgcccaca

SEQ ID NO: 464 - DNA, 4739 bp, unidentified; identical to SEQ ID NO: 452
  source 1..4739: mol_type = other DNA

SEQ ID NO: 465 - DNA, 281 bp, unidentified
  source 1..281: mol_type = other DNA
cacgtggatcttttttgtccagtttgagacttttttgtccgcccacatttctcgatcattattattttttgcgaccttttttttttttttttagcaaattggtaatactcctgcctccacagttttttttttttttttggtcgcttttttttttttttttttttttgtggggggacaaaaaagtctcaaactggacaaaaaagatccacgtgttttttttttttttttttttcagctatagatcttttttgtccagtttgagacttttttgtccgcccaca

SEQ ID NO: 466 - DNA, 278 bp, unidentified
  source 1..278: mol_type = other DNA
tgtggggggacaaaaaagtctcaaactggacaaaaaagatcagtatgaatttttttttttttttttatcatcgatcttttttgtccagtttgagacttttttgtccgcccacattttttttttttttttttttttgcgaccttttttttttttttttccttctcctctaaatcattaccttctataattttttttttttttttggtcgctttttttttttttgatacattttgtggggggacaaaaaagtctcaaactggacaaaaaagatcgatgat

SEQ ID NO: 467 - DNA, 4738 bp, unidentified; identical to SEQ ID NO: 455
  source 1..4738: mol_type = other DNA

SEQ ID NO: 468 - DNA, 278 bp, unidentified
  source 1..278: mol_type = other DNA
gatcttttttgtccagtttgagacttttttgtccgcccacagtagtgtatttttttttttttttttatcatctgtggggggacaaaaaagtctcaaactggacaaaaaagatcttttttttttttttttttttttgcgaccttttttttttttttttgctagaaagagtactgttctggaaactgacttttttttttttttttggtcgctttttttttttttgatacatttgatcttttttgtccagtttgagacttttttgtccgcccacagatgat

SEQ ID NO: 469 - DNA, 281 bp, unidentified
  source 1..281: mol_type = other DNA
cacgtgtgtggggggacaaaaaagtctcaaactggacaaaaaagatctttctcgatcattattattttttgcgaccttttttttttttttttgttgagaatggtgctagtggtagtgaacagttttttttttttttttggtcgctttttttttttttttttttttgatcttttttgtccagtttgagacttttttgtccgcccacacacgtgttttttttttttttttttttgacgaatatgtggggggacaaaaaagtctcaaactggacaaaaaagatc

SEQ ID NO: 470 - DNA, 4739 bp, unidentified; identical to SEQ ID NO: 458
  source 1..4739: mol_type = other DNA

SEQ ID NO: 471 - DNA, 281 bp, unidentified
  source 1..281: mol_type = other DNA
cacgtgtgtggggggacaaaaaagtctcaaactggacaaaaaagatctttctcgatcattattattttttgcgaccttttttttttttttttagcaaattggtaatactcctgcctccacagttttttttttttttttggtcgctttttttttttttttttttttgatcttttttgtccagtttgagacttttttgtccgcccacacacgtgttttttttttttttttttttcagctatatgtggggggacaaaaaagtctcaaactggacaaaaaagatc

SEQ ID NO: 472 - DNA, 278 bp, unidentified
  source 1..278: mol_type = other DNA
gatcttttttgtccagtttgagacttttttgtccgcccacaagtatgaatttttttttttttttttatcatctgtggggggacaaaaaagtctcaaactggacaaaaaagatcttttttttttttttttttttttgcgaccttttttttttttttttccttctcctctaaatcattaccttctataattttttttttttttttggtcgctttttttttttttgatacatttgatcttttttgtccagtttgagacttttttgtccgcccacagatgat

SEQ ID NO: 473 - DNA, 4738 bp, unidentified; identical to SEQ ID NO: 461
  source 1..4738: mol_type = other DNA

SEQ ID NO: 474 - DNA, 290 bp, unidentified
  source 1..290: mol_type = other DNA
tgtggggggacaaaaaagtctcaaactggacaaaaaagatcgtagtgtatttttttttttttttttatcatcgatcttttttgtccagtttgagacttttttgtccgcccacattttttttttttttttttttttgcggcgatcggcttttttttttttttttgctagaaagagtactgttctggaaactgacttttttttttttttttgccgatcgccgctttttttttttttgatacattttgtggggggacaaaaaagtctcaaactggacaaaaaagatcgatgat

SEQ ID NO: 475 - DNA, 293 bp, unidentified
  source 1..293: mol_type = other DNA
cacgtggatcttttttgtccagtttgagacttttttgtccgcccacatttctcgatcattattattttttgcggcgatcggcttttttttttttttttgttgagaatggtgctagtggtagtgaacagttttttttttttttttgccgatcgccgcttttttttttttttttttttttgtggggggacaaaaaagtctcaaactggacaaaaaagatccacgtgttttttttttttttttttttgacgaatagatcttttttgtccagtttgagacttttttgtccgcccaca

SEQ ID NO: 476 - DNA, 4739 bp, unidentified; identical to SEQ ID NO: 452
  source 1..4739: mol_type = other DNA

SEQ ID NO: 477 - DNA, 293 bp, unidentified
  source 1..293: mol_type = other DNA
cacgtggatcttttttgtccagtttgagacttttttgtccgcccacatttctcgatcattattattttttgcggcgatcggcttttttttttttttttagcaaattggtaatactcctgcctccacagttttttttttttttttgccgatcgccgcttttttttttttttttttttttgtggggggacaaaaaagtctcaaactggacaaaaaagatccacgtgttttttttttttttttttttcagctatagatcttttttgtccagtttgagacttttttgtccgcccaca

SEQ ID NO: 478 - DNA, 290 bp, unidentified
  source 1..290: mol_type = other DNA
tgtggggggacaaaaaagtctcaaactggacaaaaaagatcagtatgaatttttttttttttttttatcatcgatcttttttgtccagtttgagacttttttgtccgcccacattttttttttttttttttttttgcggcgatcggcttttttttttttttttccttctcctctaaatcattaccttctataattttttttttttttttgccgatcgccgctttttttttttttgatacattttgtggggggacaaaaaagtctcaaactggacaaaaaagatcgatgat

SEQ ID NO: 479 - DNA, 4738 bp, unidentified; identical to SEQ ID NO: 455
  source 1..4738: mol_type = other DNA

SEQ ID NO: 480 - DNA, 290 bp, unidentified
  source 1..290: mol_type = other DNA
gatcttttttgtccagtttgagacttttttgtccgcccacagtagtgtatttttttttttttttttatcatctgtggggggacaaaaaagtctcaaactggacaaaaaagatcttttttttttttttttttttttgcggcgatcggcttttttttttttttttgctagaaagagtactgttctggaaactgacttttttttttttttttgccgatcgccgctttttttttttttgatacatttgatcttttttgtccagtttgagacttttttgtccgcccacagatgat

SEQ ID NO: 481 - DNA, 293 bp, unidentified
  source 1..293: mol_type = other DNA
cacgtgtgtggggggacaaaaaagtctcaaactggacaaaaaagatctttctcgatcattattattttttgcggcgatcggcttttttttttttttttgttgagaatggtgctagtggtagtgaacagttttttttttttttttgccgatcgccgctttttttttttttttttttttgatcttttttgtccagtttgagacttttttgtccgcccacacacgtgttttttttttttttttttttgacgaatatgtggggggacaaaaaagtctcaaactggacaaaaaagatc

SEQ ID NO: 482 - DNA, 4739 bp, unidentified; identical to SEQ ID NO: 458
  source 1..4739: mol_type = other DNA

SEQ ID NO: 483 - DNA, 293 bp, unidentified
  source 1..293: mol_type = other DNA
cacgtgtgtggggggacaaaaaagtctcaaactggacaaaaaagatctttctcgatcattattattttttgcggcgatcggcttttttttttttttttagcaaattggtaatactcctgcctccacagttttttttttttttttgccgatcgccgctttttttttttttttttttttgatcttttttgtccagtttgagacttttttgtccgcccacacacgtgttttttttttttttttttttcagctatatgtggggggacaaaaaagtctcaaactggacaaaaaagatc

SEQ ID NO: 484 - DNA, 290 bp, unidentified
  source 1..290: mol_type = other DNA
gatcttttttgtccagtttgagacttttttgtccgcccacaagtatgaatttttttttttttttttatcatctgtggggggacaaaaaagtctcaaactggacaaaaaagatcttttttttttttttttttttttgcggcgatcggcttttttttttttttttccttctcctctaaatcattaccttctataattttttttttttttttgccgatcgccgctttttttttttttgatacatttgatcttttttgtccagtttgagacttttttgtccgcccacagatgat

SEQ ID NO: 485 - DNA, 4738 bp, unidentified; identical to SEQ ID NO: 461
  source 1..4738: mol_type = other DNA

SEQ ID NO: 486 - DNA, 284 bp, unidentified
  source 1..284: mol_type = other DNA
gatctattttgttcagttcaagactttattgtccgcccacagtagtgtatttttttttttttttttatcatctgtgggcggacaataaagtcttgaactgaacaaaatagatcttttttttttttttttttttttggcgatcgcttttttttttttttttgctagaaagagtactgttctggaaactgacttttttttttttttttgcgatcgcctttttttttttttgatacatttgatctattttgttcagttcaagactttattgtccgcccacagatgat

SEQ ID NO: 487 - DNA, 287 bp, unidentified
  source 1..287: mol_type = other DNA
cacgtgtgtgggcggacaataaagtcttgaactgaacaaaatagatctttctcgatcattattattttttggcgatcgcttttttttttttttttgttgagaatggtgctagtggtagtgaacagttttttttttttttttgcgatcgcctttttttttttttttttttttgatctattttgttcagttcaagactttattgtccgcccacacacgtgttttttttttttttttttttgacgaatatgtgggcggacaataaagtcttgaactgaacaaaatagatc

SEQ ID NO: 488 - DNA, 4739 bp, unidentified
  source 1..4739: mol_type = other DNA
tacactactgtgggcggacaataaagtcttgaactgaacaaaatagatcttttttttttttttttttttttggttacatgcatcagtcaataatgctttttttattttttttatttttttagatgcctccacagcatgaatgtactactcctttttcttcccctcccaccctcattgcatcccaggcttcccctgctccccacccccatgacagacatttttgatgattatcaacagaaactttatttctcatcggttcaggaacaatcggagggtagatggaaagaggaagggagggaaagagggagggaggaagaatcctgcgaaaaggaagggccagactgagggagaagaaaaacatgttcggggcaaaagggtaattctcaagtggggaatgccaaatgaaggggtgcttacatgggggcacaaaattccaaatcagccacagtggggtgaggtgagtatgagacgcaggtgggttgaatgaaggaaagttagtaccacttagggctacaggaccctggggttcttctgtcagaggattggggttcaggtttcaggctttagggtgtaacatgggggggcccagtaggggctatgctggttgcatggggaggccccaggcccctccccaagggcccctccttttgggggaatctcactgacgaggcagagtcgttcactgtagtctggctgcagactctcagccagtcccttagacacaccactccaggcctaaagacagatatgtccaggtcaggggtcaattaggggcaggaagtaaaagaccgagctctgtgccaaaggagtactcatgatgtctgcaaccactgtaattgattacagaagggatacacaggctcctgggcccccaataccagttgccatctgcctcattcaatctataatctgcacttctgtgtgtgtctctctctgtatagtccatgccccatttggtcggccacatcctgacagttagtgcagggcctccttccctctcctctctgcccccacccccacactctgtctgtcttgctggcaggcagttggcagttgatagactgcagcatgcttatgacagcgttctcaccgaaaagttcccgtggtattcagtaacaagatcctctaggttcttcagggtgggaattcggggcatcgtcctgacaggggagaaagagggagcaggagcacataggttaaagcttttttatcacccttctcccagttgtcccatatgaaataaagtgattctgtgttctctgtgcctgtggcttccttccatcaccaaaccctcttgggtaatctctcattacttactgtctcatcctttactcctaaagaccctgcaaaaccctcctctgctattgtcagctaccgttcccctcatttttctgggcttctccaaatctcaccgttccagccagaaatacacacagagaaggctgataatcaatcccatggagccaacagagataaccacggcttccaatgcaaacaggaaaggattctctatagaaaaaagaaaagcaaagtggaccttatatttgttgtgcccctactacatgccaggcactggtgccaggcaccgcgctaaagacatactctctgtttaatcctcacaacagctcctgtgaggcaggaacaattacctccatcttacatcttaggaaacagaatccaagagtttagggatgtggccaaggccaaagaggtagtatgtggcacagcctagatccagctggttccaaagccatcttcaccttgcaggctctctaggaatgcttcagggaaatcctatacattctatagcccccttgagtacccctcagcctccttctcaatccactcccctactctaacaacacgctaacccaaccctacacagaaaaaccttgatttctagaggttggggttagacagtgtggagagatggggcaccaagtttaggggctttagtgacagggaagtggagcaaaagacagtggtgttagaaaggctggggtgttgggctcatggattgggtcatgtgggcccattttaccttttgaagtattgctcccccagtggattgggtggctccattcactccaatgctgagcacttccacagagtgggttaaagcggctccgaacacgaaacgtgtagcgtttctgcccatccacactaggcaaggagaacttatgtctataatccactgattgttccttgaggagaaagaggatgagggaaagtgggtgtctatgagagaagggagaattaaaacatactcctgaacacccaccagtgtcatctctgctactgcccagtttctctctcatctcttgactactcaagccacactgctcccttcactgacttgaatctaatgcctcccctctggatccccttaatggcttccttttgtttacttgtctatctggtatcaggaagagtatgggtagggaatccctaatgaaaactcactggtgtcaggaatggtggctcacgcctgtaatcccagcactttgggaggccgaggtgggcagatcacctgaggtcaggagttcaagaccagcctgaccaacatggcaaaaccctgtctttactaaaaatacaaaaattagccaggcatggttgtgcatgctcccagctacttgggaggctgaagcaggagaatcacttgaaccagggagacagaggtcgcagtgagcccaagatcgccccactgcactcaagcctgggcaacagagtgaggctctgtctcaaaaaaaaaaaaaaaagaaagaaagaaagaaaagaaaagaaaaaaagaaaactcactggagaaaataggggggaaaggagttggaggagggagggtagggggtgagcagagaagctgggaggcagagaacaggagcttgatattaggtccttctatctgtctggttgaatcctttagccctactttcttggccttagctgctacattcacgtccctagtcactcacagtccagctgtggtcccagtcagtccggtactgcaccaagtgctccaaacagtggttcaagaatctgttgttccagttcagttctagctgggattcactcagtttgtgaagtgttaggttctctggagcccaggggatcactggagatatgtgtgcatatgtggtcattcccctggcctagacaagtcaggatcctgaaggtagtgcccctaatacctcctcccttcccatcatgatcccctacctcctcttttctgcccatgtacccttatgataaaagaacactactctgtagactccaatgtcccacagtatccctggtctcttgaccctttctttccaaattacccagattctgcagttttagcatctgtgtggcctgtctcctgggttcccgtgggtcctggagctgaacaacaaatgtttggtagaggtggatctcctttttttgcaactgacagccagaagtgatttcttcagagaatagatagtggctgcacttctggactttatcattatccgagttcttgtacctagaggagaaaggttggaaggaagaggaacagtggggccaatctgggtactgcagatatccagagcctagcctcatctcccctcaaccgacttatgacttaccccaggagaaaacagtggggtacctgggagacttgctaccctctctcttggtctctgatccaacccacctcttcttcatcccctccccctcgtcccttctcataccaataatgcagagtgaggttggtaggctggggctcagagctgctgttccaagtgcaattcatgtactcgacattgaacacaaaacactgaacctctgggaggggcagagtggaaacactgagggagtcagtgggcatagtggtcaggaagaaatctagattggggagaaaatgaaggcagggagggaaagagaaatgatggtcagaaggaggaggccaagcacggtggctcatgtctgtaatcctggtgctttgaaaggctgaggcaggaggatcactagaggccaggagtttgagaccagcctaggcaacatagtgagaccctgcctcaaaagaaagaaagaaacaaacaaacaagaaagaaagaaagaagaagtagcgtgaggcagggaaccctcccccttgcccttcccactccacttttcaattctgcccacatgattgtaatggccagtggcaggcaccagatctctgtacggccccttcccacagccacccttctcaccagccccctccagtcccagatttcccaccagctgtggtgtcttcattcccattgggcgtcagaattgtcgtgttcagccccactcccagcaggggcagctgcaggaataagagggatgtgaatggtaatgatggcttcaacatggcgcttgctcttcattccctgggtgtagtctgtctgtgtcaggaacctgggtccctcacccactacccctccccacccacacgtttcctctgtcatagcttccggtggaaagaaccttataaaccagggctttacagagggtgtggcaaatatgtgctgtgtgacacgggctaagtcctctaggagattaggtgctgctgtaaggtggtaaacagaaactaaagctggatatacaatagtgtcacagactcaaaaatcctcagcccacctagatcctgggaaggatctgttcactgcggccgcatgttctttttttttttttttttttttttgatctattttgttcagttcaagactttattgtccgcccacatattcgtc

SEQ ID NO: 489 - DNA, 287 bp, unidentified
  source 1..287: mol_type = other DNA
cacgtgtgtgggcggacaataaagtcttgaactgaacaaaatagatctttctcgatcattattattttttggcgatcgcttttttttttttttttagcaaattggtaatactcctgcctccacagttttttttttttttttgcgatcgcctttttttttttttttttttttgatctattttgttcagttcaagactttattgtccgcccacacacgtgttttttttttttttttttttcagctatatgtgggcggacaataaagtcttgaactgaacaaaatagatc

SEQ ID NO: 490 - DNA, 284 bp, unidentified
  source 1..284: mol_type = other DNA
gatctattttgttcagttcaagactttattgtccgcccacaagtatgaatttttttttttttttttatcatctgtgggcggacaataaagtcttgaactgaacaaaatagatcttttttttttttttttttttttggcgatcgcttttttttttttttttccttctcctctaaatcattaccttctataattttttttttttttttgcgatcgcctttttttttttttgatacatttgatctattttgttcagttcaagactttattgtccgcccacagatgat

SEQ ID NO: 491 - DNA, 4738 bp, unidentified
  source 1..4738: mol_type = other DNA
ttcatacttgtgggcggacaataaagtcttgaactgaacaaaatagatcttttttttttttttttttttttgaacatgcggccgcgtgaacagatccttcccaggatctaggtgggctgaggatttttgagtctgtgacactattgtatatccagctttagtttctgtttaccaccttacagcagcacctaatctcctagaggacttagcccgtgtcacacagcacatatttgccacaccctctgtaaagccctggtttataaggttctttccaccggaagctatgacagaggaaacgtgtgggtggggaggggtagtgggtgagggacccaggttcctgacacagacagactacacccagggaatgaagagcaagcgccatgttgaagccatcattaccattcacatccctcttattcctgcagctgcccctgctgggagtggggctgaacacgacaattctgacgcccaatgggaatgaagacaccacagctggtgggaaatctgggactggagggggctggtgagaagggtggctgtgggaaggggccgtacagagatctggtgcctgccactggccattacaatcatgtgggcagaattgaaaagtggagtgggaagggcaagggggagggttccctgcctcacgctacttcttctttctttctttcttgtttgtttgtttctttctttcttttgaggcagggtctcactatgttgcctaggctggtctcaaactcctggcctctagtgatcctcctgcctcagcctttcaaagcaccaggattacagacatgagccaccgtgcttggcctcctccttctgaccatcatttctctttccctccctgccttcattttctccccaatctagatttcttcctgaccactatgcccactgactccctcagtgtttccactctgcccctcccagaggttcagtgttttgtgttcaatgtcgagtacatgaattgcacttggaacagcagctctgagccccagcctaccaacctcactctgcattattggtatgagaagggacgagggggaggggatgaagaagaggtgggttggatcagagaccaagagagagggtagcaagtctcccaggtaccccactgttttctcctggggtaagtcataagtcggttgaggggagatgaggctaggctctggatatctgcagtacccagattggccccactgttcctcttccttccaacctttctcctctaggtacaagaactcggataatgataaagtccagaagtgcagccactatctattctctgaagaaatcacttctggctgtcagttgcaaaaaaaggagatccacctctaccaaacatttgttgttcagctccaggacccacgggaacccaggagacaggccacacagatgctaaaactgcagaatctgggtaatttggaaagaaagggtcaagagaccagggatactgtgggacattggagtctacagagtagtgttcttttatcataagggtacatgggcagaaaagaggaggtaggggatcatgatgggaagggaggaggtattaggggcactaccttcaggatcctgacttgtctaggccaggggaatgaccacatatgcacacatatctccagtgatcccctgggctccagagaacctaacacttcacaaactgagtgaatcccagctagaactgaactggaacaacagattcttgaaccactgtttggagcacttggtgcagtaccggactgactgggaccacagctggactgtgagtgactagggacgtgaatgtagcagctaaggccaagaaagtagggctaaaggattcaaccagacagatagaaggacctaatatcaagctcctgttctctgcctcccagcttctctgctcaccccctaccctccctcctccaactcctttcccccctattttctccagtgagttttctttttttcttttcttttctttctttctttcttttttttttttttttgagacagagcctcactctgttgcccaggcttgagtgcagtggggcgatcttgggctcactgcgacctctgtctccctggttcaagtgattctcctgcttcagcctcccaagtagctgggagcatgcacaaccatgcctggctaatttttgtatttttagtaaagacagggttttgccatgttggtcaggctggtcttgaactcctgacctcaggtgatctgcccacctcggcctcccaaagtgctgggattacaggcgtgagccaccattcctgacaccagtgagttttcattagggattccctacccatactcttcctgataccagatagacaagtaaacaaaaggaagccattaaggggatccagaggggaggcattagattcaagtcagtgaagggagcagtgtggcttgagtagtcaagagatgagagagaaactgggcagtagcagagatgacactggtgggtgttcaggagtatgttttaattctcccttctctcatagacacccactttccctcatcctctttctcctcaaggaacaatcagtggattatagacataagttctccttgcctagtgtggatgggcagaaacgctacacgtttcgtgttcggagccgctttaacccactctgtggaagtgctcagcattggagtgaatggagccacccaatccactgggggagcaatacttcaaaaggtaaaatgggcccacatgacccaatccatgagcccaacaccccagcctttctaacaccactgtcttttgctccacttccctgtcactaaagcccctaaacttggtgccccatctctccacactgtctaaccccaacctctagaaatcaaggtttttctgtgtagggttgggttagcgtgttgttagagtaggggagtggattgagaaggaggctgaggggtactcaagggggctatagaatgtataggatttccctgaagcattcctagagagcctgcaaggtgaagatggctttggaaccagctggatctaggctgtgccacatactacctctttggccttggccacatccctaaactcttggattctgtttcctaagatgtaagatggaggtaattgttcctgcctcacaggagctgttgtgaggattaaacagagagtatgtctttagcgcggtgcctggcaccagtgcctggcatgtagtaggggcacaacaaatataaggtccactttgcttttcttttttctatagagaatcctttcctgtttgcattggaagccgtggttatctctgttggctccatgggattgattatcagccttctctgtgtgtatttctggctggaacggtgagatttggagaagcccagaaaaatgaggggaacggtagctgacaatagcagaggagggttttgcagggtctttaggagtaaaggatgagacagtaagtaatgagagattacccaagagggtttggtgatggaaggaagccacaggcacagagaacacagaatcactttatttcatatgggacaactgggagaagggtgataaaaaagctttaacctatgtgctcctgctccctctttctcccctgtcaggacgatgccccgaattcccaccctgaagaacctagaggatcttgttactgaataccacgggaacttttcggtgagaacgctgtcataagcatgctgcagtctatcaactgccaactgcctgccagcaagacagacagagtgtgggggtgggggcagagaggagagggaaggaggccctgcactaactgtcaggatgtggccgaccaaatggggcatggactatacagagagagacacacacagaagtgcagattatagattgaatgaggcagatggcaactggtattgggggcccaggagcctgtgtatcccttctgtaatcaattacagtggttgcagacatcatgagtactcctttggcacagagctcggtcttttacttcctgcccctaattgacccctgacctggacatatctgtctttaggcctggagtggtgtgtctaagggactggctgagagtctgcagccagactacagtgaacgactctgcctcgtcagtgagattcccccaaaaggaggggcccttggggaggggcctggggcctccccatgcaaccagcatagcccctactgggcccccccatgttacaccctaaagcctgaaacctgaaccccaatcctctgacagaagaaccccagggtcctgtagccctaagtggtactaactttccttcattcaacccacctgcgtctcatactcacctcaccccactgtggctgatttggaattttgtgcccccatgtaagcaccccttcatttggcattccccacttgagaattacccttttgccccgaacatgtttttcttctccctcagtctggcccttccttttcgcaggattcttcctccctccctctttccctcccttcctctttccatctaccctccgattgttcctgaaccgatgagaaataaagtttctgttgataatcatcaaaaatgtctgtcatgggggtggggagcaggggaagcctgggatgcaatgagggtgggaggggaagaaaaaggagtagtacattcatgctgtggaggcatctaaaaaaataaaaaaaataaaaaaagcattattgactgatgcatgtaacctttttttttttttttttttttttgatctattttgttcagttcaagactttattgtccgcccacatatagctg

SEQ ID NO: 492 - DNA, 284 bp, unidentified
  source 1..284: mol_type = other DNA
tgtgggcggacaataaagtcttgaactgaacaaaatagatcgtagtgtatttttttttttttttttatcatcgatctattttgttcagttcaagactttattgtccgcccacattttttttttttttttttttttggcgatcgcttttttttttttttttgctagaaagagtactgttctggaaactgacttttttttttttttttgcgatcgcctttttttttttttgatacattttgtgggcggacaataaagtcttgaactgaacaaaatagatcgatgat

SEQ ID NO: 493 - DNA, 287 bp, unidentified
  source 1..287: mol_type = other DNA
cacgtggatctattttgttcagttcaagactttattgtccgcccacatttctcgatcattattattttttggcgatcgcttttttttttttttttgttgagaatggtgctagtggtagtgaacagttttttttttttttttgcgatcgccttttttttttttttttttttttgtgggcggacaataaagtcttgaactgaacaaaatagatccacgtgttttttttttttttttttttgacgaatagatctattttgttcagttcaagactttattgtccgcccaca

SEQ ID NO: 494 - DNA, 4739 bp, unidentified
  source 1..4739: mol_type = other DNA
tacactacgatctattttgttcagttcaagactttattgtccgcccacattttttttttttttttttttttggttacatgcatcagtcaataatgctttttttattttttttatttttttagatgcctccacagcatgaatgtactactcctttttcttcccctcccaccctcattgcatcccaggcttcccctgctccccacccccatgacagacatttttgatgattatcaacagaaactttatttctcatcggttcaggaacaatcggagggtagatggaaagaggaagggagggaaagagggagggaggaagaatcctgcgaaaaggaagggccagactgagggagaagaaaaacatgttcggggcaaaagggtaattctcaagtggggaatgccaaatgaaggggtgcttacatgggggcacaaaattccaaatcagccacagtggggtgaggtgagtatgagacgcaggtgggttgaatgaaggaaagttagtaccacttagggctacaggaccctggggttcttctgtcagaggattggggttcaggtttcaggctttagggtgtaacatgggggggcccagtaggggctatgctggttgcatggggaggccccaggcccctccccaagggcccctccttttgggggaatctcactgacgaggcagagtcgttcactgtagtctggctgcagactctcagccagtcccttagacacaccactccaggcctaaagacagatatgtccaggtcaggggtcaattaggggcaggaagtaaaagaccgagctctgtgccaaaggagtactcatgatgtctgcaaccactgtaattgattacagaagggatacacaggctcctgggcccccaataccagttgccatctgcctcattcaatctataatctgcacttctgtgtgtgtctctctctgtatagtccatgccccatttggtcggccacatcctgacagttagtgcagggcctccttccctctcctctctgcccccacccccacactctgtctgtcttgctggcaggcagttggcagttgatagactgcagcatgcttatgacagcgttctcaccgaaaagttcccgtggtattcagtaacaagatcctctaggttcttcagggtgggaattcggggcatcgtcctgacaggggagaaagagggagcaggagcacataggttaaagcttttttatcacccttctcccagttgtcccatatgaaataaagtgattctgtgttctctgtgcctgtggcttccttccatcaccaaaccctcttgggtaatctctcattacttactgtctcatcctttactcctaaagaccctgcaaaaccctcctctgctattgtcagctaccgttcccctcatttttctgggcttctccaaatctcaccgttccagccagaaatacacacagagaaggctgataatcaatcccatggagccaacagagataaccacggcttccaatgcaaacaggaaaggattctctatagaaaaaagaaaagcaaagtggaccttatatttgttgtgcccctactacatgccaggcactggtgccaggcaccgcgctaaagacatactctctgtttaatcctcacaacagctcctgtgaggcaggaacaattacctccatcttacatcttaggaaacagaatccaagagtttagggatgtggccaaggccaaagaggtagtatgtggcacagcctagatccagctggttccaaagccatcttcaccttgcaggctctctaggaatgcttcagggaaatcctatacattctatagcccccttgagtacccctcagcctccttctcaatccactcccctactctaacaacacgctaacccaaccctacacagaaaaaccttgatttctagaggttggggttagacagtgtggagagatggggcaccaagtttaggggctttagtgacagggaagtggagcaaaagacagtggtgttagaaaggctggggtgttgggctcatggattgggtcatgtgggcccattttaccttttgaagtattgctcccccagtggattgggtggctccattcactccaatgctgagcacttccacagagtgggttaaagcggctccgaacacgaaacgtgtagcgtttctgcccatccacactaggcaaggagaacttatgtctataatccactgattgttccttgaggagaaagaggatgagggaaagtgggtgtctatgagagaagggagaattaaaacatactcctgaacacccaccagtgtcatctctgctactgcccagtttctctctcatctcttgactactcaagccacactgctcccttcactgacttgaatctaatgcctcccctctggatccccttaatggcttccttttgtttacttgtctatctggtatcaggaagagtatgggtagggaatccctaatgaaaactcactggtgtcaggaatggtggctcacgcctgtaatcccagcactttgggaggccgaggtgggcagatcacctgaggtcaggagttcaagaccagcctgaccaacatggcaaaaccctgtctttactaaaaatacaaaaattagccaggcatggttgtgcatgctcccagctacttgggaggctgaagcaggagaatcacttgaaccagggagacagaggtcgcagtgagcccaagatcgccccactgcactcaagcctgggcaacagagtgaggctctgtctcaaaaaaaaaaaaaaaagaaagaaagaaagaaaagaaaagaaaaaaagaaaactcactggagaaaataggggggaaaggagttggaggagggagggtagggggtgagcagagaagctgggaggcagagaacaggagcttgatattaggtccttctatctgtctggttgaatcctttagccctactttcttggccttagctgctacattcacgtccctagtcactcacagtccagctgtggtcccagtcagtccggtactgcaccaagtgctccaaacagtggttcaagaatctgttgttccagttcagttctagctgggattcactcagtttgtgaagtgttaggttctctggagcccaggggatcactggagatatgtgtgcatatgtggtcattcccctggcctagacaagtcaggatcctgaaggtagtgcccctaatacctcctcccttcccatcatgatcccctacctcctcttttctgcccatgtacccttatgataaaagaacactactctgtagactccaatgtcccacagtatccctggtctcttgaccctttctttccaaattacccagattctgcagttttagcatctgtgtggcctgtctcctgggttcccgtgggtcctggagctgaacaacaaatgtttggtagaggtggatctcctttttttgcaactgacagccagaagtgatttcttcagagaatagatagtggctgcacttctggactttatcattatccgagttcttgtacctagaggagaaaggttggaaggaagaggaacagtggggccaatctgggtactgcagatatccagagcctagcctcatctcccctcaaccgacttatgacttaccccaggagaaaacagtggggtacctgggagacttgctaccctctctcttggtctctgatccaacccacctcttcttcatcccctccccctcgtcccttctcataccaataatgcagagtgaggttggtaggctggggctcagagctgctgttccaagtgcaattcatgtactcgacattgaacacaaaacactgaacctctgggaggggcagagtggaaacactgagggagtcagtgggcatagtggtcaggaagaaatctagattggggagaaaatgaaggcagggagggaaagagaaatgatggtcagaaggaggaggccaagcacggtggctcatgtctgtaatcctggtgctttgaaaggctgaggcaggaggatcactagaggccaggagtttgagaccagcctaggcaacatagtgagaccctgcctcaaaagaaagaaagaaacaaacaaacaagaaagaaagaaagaagaagtagcgtgaggcagggaaccctcccccttgcccttcccactccacttttcaattctgcccacatgattgtaatggccagtggcaggcaccagatctctgtacggccccttcccacagccacccttctcaccagccccctccagtcccagatttcccaccagctgtggtgtcttcattcccattgggcgtcagaattgtcgtgttcagccccactcccagcaggggcagctgcaggaataagagggatgtgaatggtaatgatggcttcaacatggcgcttgctcttcattccctgggtgtagtctgtctgtgtcaggaacctgggtccctcacccactacccctccccacccacacgtttcctctgtcatagcttccggtggaaagaaccttataaaccagggctttacagagggtgtggcaaatatgtgctgtgtgacacgggctaagtcctctaggagattaggtgctgctgtaaggtggtaaacagaaactaaagctggatatacaatagtgtcacagactcaaaaatcctcagcccacctagatcctgggaaggatctgttcactgcggccgcatgttcttttttttttttttttttttttttgtgggcggacaataaagtcttgaactgaacaaaatagatctattcgtc

SEQ ID NO: 495 - DNA, 287 bp, unidentified
  source 1..287: mol_type = other DNA
cacgtggatctattttgttcagttcaagactttattgtccgcccacatttctcgatcattattattttttggcgatcgcttttttttttttttttagcaaattggtaatactcctgcctccacagttttttttttttttttgcgatcgccttttttttttttttttttttttgtgggcggacaataaagtcttgaactgaacaaaatagatccacgtgttttttttttttttttttttcagctatagatctattttgttcagttcaagactttattgtccgcccaca

SEQ ID NO: 496 - DNA, 284 bp, unidentified
  source 1..284: mol_type = other DNA
tgtgggcggacaataaagtcttgaactgaacaaaatagatcagtatgaatttttttttttttttttatcatcgatctattttgttcagttcaagactttattgtccgcccacattttttttttttttttttttttggcgatcgcttttttttttttttttccttctcctctaaatcattaccttctataattttttttttttttttgcgatcgcctttttttttttttgatacattttgtgggcggacaataaagtcttgaactgaacaaaatagatcgatgat

SEQ ID NO: 497 - DNA, 4738 bp, unidentified
  source 1..4738: mol_type = other DNA
ttcatactgatctattttgttcagttcaagactttattgtccgcccacattttttttttttttttttttttgaacatgcggccgcgtgaacagatccttcccaggatctaggtgggctgaggatttttgagtctgtgacactattgtatatccagctttagtttctgtttaccaccttacagcagcacctaatctcctagaggacttagcccgtgtcacacagcacatatttgccacaccctctgtaaagccctggtttataaggttctttccaccggaagctatgacagaggaaacgtgtgggtggggaggggtagtgggtgagggacccaggttcctgacacagacagactacacccagggaatgaagagcaagcgccatgttgaagccatcattaccattcacatccctcttattcctgcagctgcccctgctgggagtggggctgaacacgacaattctgacgcccaatgggaatgaagacaccacagctggtgggaaatctgggactggagggggctggtgagaagggtggctgtgggaaggggccgtacagagatctggtgcctgccactggccattacaatcatgtgggcagaattgaaaagtggagtgggaagggcaagggggagggttccctgcctcacgctacttcttctttctttctttcttgtttgtttgtttctttctttcttttgaggcagggtctcactatgttgcctaggctggtctcaaactcctggcctctagtgatcctcctgcctcagcctttcaaagcaccaggattacagacatgagccaccgtgcttggcctcctccttctgaccatcatttctctttccctccctgccttcattttctccccaatctagatttcttcctgaccactatgcccactgactccctcagtgtttccactctgcccctcccagaggttcagtgttttgtgttcaatgtcgagtacatgaattgcacttggaacagcagctctgagccccagcctaccaacctcactctgcattattggtatgagaagggacgagggggaggggatgaagaagaggtgggttggatcagagaccaagagagagggtagcaagtctcccaggtaccccactgttttctcctggggtaagtcataagtcggttgaggggagatgaggctaggctctggatatctgcagtacccagattggccccactgttcctcttccttccaacctttctcctctaggtacaagaactcggataatgataaagtccagaagtgcagccactatctattctctgaagaaatcacttctggctgtcagttgcaaaaaaaggagatccacctctaccaaacatttgttgttcagctccaggacccacgggaacccaggagacaggccacacagatgctaaaactgcagaatctgggtaatttggaaagaaagggtcaagagaccagggatactgtgggacattggagtctacagagtagtgttcttttatcataagggtacatgggcagaaaagaggaggtaggggatcatgatgggaagggaggaggtattaggggcactaccttcaggatcctgacttgtctaggccaggggaatgaccacatatgcacacatatctccagtgatcccctgggctccagagaacctaacacttcacaaactgagtgaatcccagctagaactgaactggaacaacagattcttgaaccactgtttggagcacttggtgcagtaccggactgactgggaccacagctggactgtgagtgactagggacgtgaatgtagcagctaaggccaagaaagtagggctaaaggattcaaccagacagatagaaggacctaatatcaagctcctgttctctgcctcccagcttctctgctcaccccctaccctccctcctccaactcctttcccccctattttctccagtgagttttctttttttcttttcttttctttctttctttcttttttttttttttttgagacagagcctcactctgttgcccaggcttgagtgcagtggggcgatcttgggctcactgcgacctctgtctccctggttcaagtgattctcctgcttcagcctcccaagtagctgggagcatgcacaaccatgcctggctaatttttgtatttttagtaaagacagggttttgccatgttggtcaggctggtcttgaactcctgacctcaggtgatctgcccacctcggcctcccaaagtgctgggattacaggcgtgagccaccattcctgacaccagtgagttttcattagggattccctacccatactcttcctgataccagatagacaagtaaacaaaaggaagccattaaggggatccagaggggaggcattagattcaagtcagtgaagggagcagtgtggcttgagtagtcaagagatgagagagaaactgggcagtagcagagatgacactggtgggtgttcaggagtatgttttaattctcccttctctcatagacacccactttccctcatcctctttctcctcaaggaacaatcagtggattatagacataagttctccttgcctagtgtggatgggcagaaacgctacacgtttcgtgttcggagccgctttaacccactctgtggaagtgctcagcattggagtgaatggagccacccaatccactgggggagcaatacttcaaaaggtaaaatgggcccacatgacccaatccatgagcccaacaccccagcctttctaacaccactgtcttttgctccacttccctgtcactaaagcccctaaacttggtgccccatctctccacactgtctaaccccaacctctagaaatcaaggtttttctgtgtagggttgggttagcgtgttgttagagtaggggagtggattgagaaggaggctgaggggtactcaagggggctatagaatgtataggatttccctgaagcattcctagagagcctgcaaggtgaagatggctttggaaccagctggatctaggctgtgccacatactacctctttggccttggccacatccctaaactcttggattctgtttcctaagatgtaagatggaggtaattgttcctgcctcacaggagctgttgtgaggattaaacagagagtatgtctttagcgcggtgcctggcaccagtgcctggcatgtagtaggggcacaacaaatataaggtccactttgcttttcttttttctatagagaatcctttcctgtttgcattggaagccgtggttatctctgttggctccatgggattgattatcagccttctctgtgtgtatttctggctggaacggtgagatttggagaagcccagaaaaatgaggggaacggtagctgacaatagcagaggagggttttgcagggtctttaggagtaaaggatgagacagtaagtaatgagagattacccaagagggtttggtgatggaaggaagccacaggcacagagaacacagaatcactttatttcatatgggacaactgggagaagggtgataaaaaagctttaacctatgtgctcctgctccctctttctcccctgtcaggacgatgccccgaattcccaccctgaagaacctagaggatcttgttactgaataccacgggaacttttcggtgagaacgctgtcataagcatgctgcagtctatcaactgccaactgcctgccagcaagacagacagagtgtgggggtgggggcagagaggagagggaaggaggccctgcactaactgtcaggatgtggccgaccaaatggggcatggactatacagagagagacacacacagaagtgcagattatagattgaatgaggcagatggcaactggtattgggggcccaggagcctgtgtatcccttctgtaatcaattacagtggttgcagacatcatgagtactcctttggcacagagctcggtcttttacttcctgcccctaattgacccctgacctggacatatctgtctttaggcctggagtggtgtgtctaagggactggctgagagtctgcagccagactacagtgaacgactctgcctcgtcagtgagattcccccaaaaggaggggcccttggggaggggcctggggcctccccatgcaaccagcatagcccctactgggcccccccatgttacaccctaaagcctgaaacctgaaccccaatcctctgacagaagaaccccagggtcctgtagccctaagtggtactaactttccttcattcaacccacctgcgtctcatactcacctcaccccactgtggctgatttggaattttgtgcccccatgtaagcaccccttcatttggcattccccacttgagaattacccttttgccccgaacatgtttttcttctccctcagtctggcccttccttttcgcaggattcttcctccctccctctttccctcccttcctctttccatctaccctccgattgttcctgaaccgatgagaaataaagtttctgttgataatcatcaaaaatgtctgtcatgggggtggggagcaggggaagcctgggatgcaatgagggtgggaggggaagaaaaaggagtagtacattcatgctgtggaggcatctaaaaaaataaaaaaaataaaaaaagcattattgactgatgcatgtaaccttttttttttttttttttttttttgtgggcggacaataaagtcttgaactgaacaaaatagatctatagctg

SEQ ID NO: 498 - DNA, 278 bp, unidentified
  source 1..278: mol_type = other DNA
gatctattttgttcagttcaagactttattgtccgcccacagtagtgtatttttttttttttttttatcatctgtgggcggacaataaagtcttgaactgaacaaaatagatcttttttttttttttttttttttgcgaccttttttttttttttttgctagaaagagtactgttctggaaactgacttttttttttttttttggtcgctttttttttttttgatacatttgatctattttgttcagttcaagactttattgtccgcccacagatgat

SEQ ID NO: 499 - DNA, 280 bp, unidentified
  source 1..280: mol_type = other DNA
cacgtgtgtgggcggacaataaagtcttgaactgaacaaaatagatctttctcgatcattattattttttgcgaccttttttttttttttttgttgagaatggtgctagtggtagtgaacagtttttttttttttttggtcgctttttttttttttttttttttgatctattttgttcagttcaagactttattgtccgcccacacacgtgttttttttttttttttttttgacgaatatgtgggcggacaataaagtcttgaactgaacaaaatagatc

SEQ ID NO: 500 - DNA, 4739 bp, unidentified; identical to SEQ ID NO: 488
  source 1..4739: mol_type = other DNA

SEQ ID NO: 501 - DNA, 281 bp, unidentified
  source 1..281: mol_type = other DNA
cacgtgtgtgggcggacaataaagtcttgaactgaacaaaatagatctttctcgatcattattattttttgcgaccttttttttttttttttagcaaattggtaatactcctgcctccacagttttttttttttttttggtcgctttttttttttttttttttttgatctattttgttcagttcaagactttattgtccgcccacacacgtgttttttttttttttttttttcagctatatgtgggcggacaataaagtcttgaactgaacaaaatagatc

SEQ ID NO: 502 - DNA, 278 bp, unidentified
  source 1..278: mol_type = other DNA
gatctattttgttcagttcaagactttattgtccgcccacaagtatgaatttttttttttttttttatcatctgtgggcggacaataaagtcttgaactgaacaaaatagatcttttttttttttttttttttttgcgaccttttttttttttttttccttctcctctaaatcattaccttctataattttttttttttttttggtcgctttttttttttttgatacatttgatctattttgttcagttcaagactttattgtccgcccacagatgat

SEQ ID NO: 503 - DNA, 4738 bp, unidentified; identical to SEQ ID NO: 491
  source 1..4738: mol_type = other DNA

SEQ ID NO: 504 - DNA, 278 bp, unidentified
  source 1..278: mol_type = other DNA
tgtgggcggacaataaagtcttgaactgaacaaaatagatcgtagtgtatttttttttttttttttatcatcgatctattttgttcagttcaagactttattgtccgcccacattttttttttttttttttttttgcgaccttttttttttttttttgctagaaagagtactgttctggaaactgacttttttttttttttttggtcgctttttttttttttgatacattttgtgggcggacaataaagtcttgaactgaacaaaatagatcgatgat

SEQ ID NO: 505 - DNA, 281 bp, unidentified
  source 1..281: mol_type = other DNA
cacgtggatctattttgttcagttcaagactttattgtccgcccacatttctcgatcattattattttttgcgaccttttttttttttttttgttgagaatggtgctagtggtagtgaacagttttttttttttttttggtcgcttttttttttttttttttttttgtgggcggacaataaagtcttgaactgaacaaaatagatccacgtgttttttttttttttttttttgacgaatagatctattttgttcagttcaagactttattgtccgcccaca

SEQ ID NO: 506 - DNA, 4739 bp, unidentified; identical to SEQ ID NO: 494
  source 1..4739: mol_type = other DNA

SEQ ID NO: 507 - DNA, 281 bp, unidentified
  source 1..281: mol_type = other DNA
cacgtggatctattttgttcagttcaagactttattgtccgcccacatttctcgatcattattattttttgcgaccttttttttttttttttagcaaattggtaatactcctgcctccacagttttttttttttttttggtcgcttttttttttttttttttttttgtgggcggacaataaagtcttgaactgaacaaaatagatccacgtgttttttttttttttttttttcagctatagatctattttgttcagttcaagactttattgtccgcccaca

SEQ ID NO: 508 - DNA, 278 bp, unidentified
  source 1..278: mol_type = other DNA
tgtgggcggacaataaagtcttgaactgaacaaaatagatcagtatgaatttttttttttttttttatcatcgatctattttgttcagttcaagactttattgtccgcccacattttttttttttttttttttttgcgaccttttttttttttttttccttctcctctaaatcattaccttctataattttttttttttttttggtcgctttttttttttttgatacattttgtgggcggacaataaagtcttgaactgaacaaaatagatcgatgat

SEQ ID NO: 509 - DNA, 4738 bp, unidentified; identical to SEQ ID NO: 497
  source 1..4738: mol_type = other DNA

SEQ ID NO: 510 - DNA, 290 bp, unidentified
  source 1..290: mol_type = other DNA
gatctattttgttcagttcaagactttattgtccgcccacagtagtgtatttttttttttttttttatcatctgtgggcggacaataaagtcttgaactgaacaaaatagatcttttttttttttttttttttttgcggcgatcggcttttttttttttttttgctagaaagagtactgttctggaaactgacttttttttttttttttgccgatcgccgctttttttttttttgatacatttgatctattttgttcagttcaagactttattgtccgcccacagatgat

SEQ ID NO: 511 - DNA, 293 bp, unidentified
  source 1..293: mol_type = other DNA
cacgtgtgtgggcggacaataaagtcttgaactgaacaaaatagatctttctcgatcattattattttttgcggcgatcggcttttttttttttttttgttgagaatggtgctagtggtagtgaacagttttttttttttttttgccgatcgccgctttttttttttttttttttttgatctattttgttcagttcaagactttattgtccgcccacacacgtgttttttttttttttttttttgacgaatatgtgggcggacaataaagtcttgaactgaacaaaatagatc

SEQ ID NO: 512 - DNA, 4739 bp, unidentified; identical to SEQ ID NO: 488
  source 1..4739: mol_type = other DNA

SEQ ID NO: 513 - DNA, 293 bp, unidentified
  source 1..293: mol_type = other DNA
cacgtgtgtgggcggacaataaagtcttgaactgaacaaaatagatctttctcgatcattattattttttgcggcgatcggcttttttttttttttttagcaaattggtaatactcctgcctccacagttttttttttttttttgccgatcgccgctttttttttttttttttttttgatctattttgttcagttcaagactttattgtccgcccacacacgtgttttttttttttttttttttcagctatatgtgggcggacaataaagtcttgaactgaacaaaatagatc

SEQ ID NO: 514 - DNA, 290 bp, unidentified
  source 1..290: mol_type = other DNA
gatctattttgttcagttcaagactttattgtccgcccacaagtatgaatttttttttttttttttatcatctgtgggcggacaataaagtcttgaactgaacaaaatagatcttttttttttttttttttttttgcggcgatcggcttttttttttttttttccttctcctctaaatcattaccttctataattttttttttttttttgccgatcgccgctttttttttttttgatacatttgatctattttgttcagttcaagactttattgtccgcccacagatgat

SEQ ID NO: 515 - DNA, 4738 bp, unidentified; identical to SEQ ID NO: 491
  source 1..4738: mol_type = other DNA

SEQ ID NO: 516 - DNA, 290 bp, unidentified
  source 1..290: mol_type = other DNA
tgtgggcggacaataaagtcttgaactgaacaaaatagatcgtagtgtatttttttttttttttttatcatcgatctattttgttcagttcaagactttattgtccgcccacattttttttttttttttttttttgcggcgatcggcttttttttttttttttgctagaaagagtactgttctggaaactgacttttttttttttttttgccgatcgccgctttttttttttttgatacattttgtgggcggacaataaagtcttgaactgaacaaaatagatcgatgat

SEQ ID NO: 517 - DNA, 293 bp, unidentified
  source 1..293: mol_type = other DNA
cacgtggatctattttgttcagttcaagactttattgtccgcccacatttctcgatcattattattttttgcggcgatcggcttttttttttttttttgttgagaatggtgctagtggtagtgaacagttttttttttttttttgccgatcgccgcttttttttttttttttttttttgtgggcggacaataaagtcttgaactgaacaaaatagatccacgtgttttttttttttttttttttgacgaatagatctattttgttcagttcaagactttattgtccgcccaca

SEQ ID NO: 518 - DNA, 4739 bp, unidentified; identical to SEQ ID NO: 494
  source 1..4739: mol_type = other DNA

SEQ ID NO: 519 - DNA, 293 bp, unidentified
  source 1..293: mol_type = other DNA
cacgtggatctattttgttcagttcaagactttattgtccgcccacatttctcgatcattattattttttgcggcgatcggcttttttttttttttttagcaaattggtaatactcctgcctccacagttttttttttttttttgccgatcgccgcttttttttttttttttttttttgtgggcggacaataaagtcttgaactgaacaaaatagatccacgtgttttttttttttttttttttcagctatagatctattttgttcagttcaagactttattgtccgcccaca

SEQ ID NO: 520 - DNA, 290 bp, unidentified
  source 1..290: mol_type = other DNA
tgtgggcggacaataaagtcttgaactgaacaaaatagatcagtatgaatttttttttttttttttatcatcgatctattttgttcagttcaagactttattgtccgcccacattttttttttttttttttttttgcggcgatcggcttttttttttttttttccttctcctctaaatcattaccttctataattttttttttttttttgccgatcgccgctttttttttttttgatacattttgtgggcggacaataaagtcttgaactgaacaaaatagatcgatgat

SEQ ID NO: 521 - DNA, 4739 bp, unidentified
  source 1..4739: mol_type = other DNA
ttcatactgatctattttgttcagttcaagactttattgtccgcccacattttttttttttttttttttttgaacatgcggccgcagtgaacagatccttcccaggatctaggtgggctgaggatttttgagtctgtgacactattgtatatccagctttagtttctgtttaccaccttacagcagcacctaatctcctagaggacttagcccgtgtcacacagcacatatttgccacaccctctgtaaagccctggtttataaggttctttccaccggaagctatgacagaggaaacgtgtgggtggggaggggtagtgggtgagggacccaggttcctgacacagacagactacacccagggaatgaagagcaagcgccatgttgaagccatcattaccattcacatccctcttattcctgcagctgcccctgctgggagtggggctgaacacgacaattctgacgcccaatgggaatgaagacaccacagctggtgggaaatctgggactggagggggctggtgagaagggtggctgtgggaaggggccgtacagagatctggtgcctgccactggccattacaatcatgtgggcagaattgaaaagtggagtgggaagggcaagggggagggttccctgcctcacgctacttcttctttctttctttcttgtttgtttgtttctttctttcttttgaggcagggtctcactatgttgcctaggctggtctcaaactcctggcctctagtgatcctcctgcctcagcctttcaaagcaccaggattacagacatgagccaccgtgcttggcctcctccttctgaccatcatttctctttccctccctgccttcattttctccccaatctagatttcttcctgaccactatgcccactgactccctcagtgtttccactctgcccctcccagaggttcagtgttttgtgttcaatgtcgagtacatgaattgcacttggaacagcagctctgagccccagcctaccaacctcactctgcattattggtatgagaagggacgagggggaggggatgaagaagaggtgggttggatcagagaccaagagagagggtagcaagtctcccaggtaccccactgttttctcctggggtaagtcataagtcggttgaggggagatgaggctaggctctggatatctgcagtacccagattggccccactgttcctcttccttccaacctttctcctctaggtacaagaactcggataatgataaagtccagaagtgcagccactatctattctctgaagaaatcacttctggctgtcagttgcaaaaaaaggagatccacctctaccaaacatttgttgttcagctccaggacccacgggaacccaggagacaggccacacagatgctaaaactgcagaatctgggtaatttggaaagaaagggtcaagagaccagggatactgtgggacattggagtctacagagtagtgttcttttatcataagggtacatgggcagaaaagaggaggtaggggatcatgatgggaagggaggaggtattaggggcactaccttcaggatcctgacttgtctaggccaggggaatgaccacatatgcacacatatctccagtgatcccctgggctccagagaacctaacacttcacaaactgagtgaatcccagctagaactgaactggaacaacagattcttgaaccactgtttggagcacttggtgcagtaccggactgactgggaccacagctggactgtgagtgactagggacgtgaatgtagcagctaaggccaagaaagtagggctaaaggattcaaccagacagatagaaggacctaatatcaagctcctgttctctgcctcccagcttctctgctcaccccctaccctccctcctccaactcctttcccccctattttctccagtgagttttctttttttcttttcttttctttctttctttcttttttttttttttttgagacagagcctcactctgttgcccaggcttgagtgcagtggggcgatcttgggctcactgcgacctctgtctccctggttcaagtgattctcctgcttcagcctcccaagtagctgggagcatgcacaaccatgcctggctaatttttgtatttttagtaaagacagggttttgccatgttggtcaggctggtcttgaactcctgacctcaggtgatctgcccacctcggcctcccaaagtgctgggattacaggcgtgagccaccattcctgacaccagtgagttttcattagggattccctacccatactcttcctgataccagatagacaagtaaacaaaaggaagccattaaggggatccagaggggaggcattagattcaagtcagtgaagggagcagtgtggcttgagtagtcaagagatgagagagaaactgggcagtagcagagatgacactggtgggtgttcaggagtatgttttaattctcccttctctcatagacacccactttccctcatcctctttctcctcaaggaacaatcagtggattatagacataagttctccttgcctagtgtggatgggcagaaacgctacacgtttcgtgttcggagccgctttaacccactctgtggaagtgctcagcattggagtgaatggagccacccaatccactgggggagcaatacttcaaaaggtaaaatgggcccacatgacccaatccatgagcccaacaccccagcctttctaacaccactgtcttttgctccacttccctgtcactaaagcccctaaacttggtgccccatctctccacactgtctaaccccaacctctagaaatcaaggtttttctgtgtagggttgggttagcgtgttgttagagtaggggagtggattgagaaggaggctgaggggtactcaagggggctatagaatgtataggatttccctgaagcattcctagagagcctgcaaggtgaagatggctttggaaccagctggatctaggctgtgccacatactacctctttggccttggccacatccctaaactcttggattctgtttcctaagatgtaagatggaggtaattgttcctgcctcacaggagctgttgtgaggattaaacagagagtatgtctttagcgcggtgcctggcaccagtgcctggcatgtagtaggggcacaacaaatataaggtccactttgcttttcttttttctatagagaatcctttcctgtttgcattggaagccgtggttatctctgttggctccatgggattgattatcagccttctctgtgtgtatttctggctggaacggtgagatttggagaagcccagaaaaatgaggggaacggtagctgacaatagcagaggagggttttgcagggtctttaggagtaaaggatgagacagtaagtaatgagagattacccaagagggtttggtgatggaaggaagccacaggcacagagaacacagaatcactttatttcatatgggacaactgggagaagggtgataaaaaagctttaacctatgtgctcctgctccctctttctcccctgtcaggacgatgccccgaattcccaccctgaagaacctagaggatcttgttactgaataccacgggaacttttcggtgagaacgctgtcataagcatgctgcagtctatcaactgccaactgcctgccagcaagacagacagagtgtgggggtgggggcagagaggagagggaaggaggccctgcactaactgtcaggatgtggccgaccaaatggggcatggactatacagagagagacacacacagaagtgcagattatagattgaatgaggcagatggcaactggtattgggggcccaggagcctgtgtatcccttctgtaatcaattacagtggttgcagacatcatgagtactcctttggcacagagctcggtcttttacttcctgcccctaattgacccctgacctggacatatctgtctttaggcctggagtggtgtgtctaagggactggctgagagtctgcagccagactacagtgaacgactctgcctcgtcagtgagattcccccaaaaggaggggcccttggggaggggcctggggcctccccatgcaaccagcatagcccctactgggcccccccatgttacaccctaaagcctgaaacctgaaccccaatcctctgacagaagaaccccagggtcctgtagccctaagtggtactaactttccttcattcaacccacctgcgtctcatactcacctcaccccactgtggctgatttggaattttgtgcccccatgtaagcaccccttcatttggcattccccacttgagaattacccttttgccccgaacatgtttttcttctccctcagtctggcccttccttttcgcaggattcttcctccctccctctttccctcccttcctctttccatctaccctccgattgttcctgaaccgatgagaaataaagtttctgttgataatcatcaaaaatgtctgtcatgggggtggggagcaggggaagcctgggatgcaatgagggtgggaggggaagaaaaaggagtagtacattcatgctgtggaggcatctaaaaaaataaaaaaaataaaaaaagcattattgactgatgcatgtaaccttttttttttttttttttttttttgtgggcggacaataaagtcttgaactgaacaaaatagatctatagctg

SEQ ID NO: 522 - DNA, 248 bp, unidentified
  source 1..248: mol_type = other DNA
ctgatgaatcccctaatgattttggtaaagtagtgtatttttttttttttttttatcatctttaccaaaatcattaggggattcatcagttttttttttttttttttttttggcgatcgcttttttttttttttttgctagaaagagtactgttctggaaactgacttttttttttttttttgcgatcgcctttttttttttttgatacatttctgatgaatcccctaatgattttggtaaagatgat

SEQ ID NO: 523 - DNA, 251 bp, unidentified
  source 1..251: mol_type = other DNA
cacgtgtttaccaaaatcattaggggattcatcagtttctcgatcattattattttttggcgatcgcttttttttttttttttgttgagaatggtgctagtggtagtgaacagttttttttttttttttgcgatcgcctttttttttttttttttttttctgatgaatcccctaatgattttggtaaacacgtgttttttttttttttttttttgacgaatatttaccaaaatcattaggggattcatcag

SEQ ID NO: 524 - DNA, 4715 bp, unidentified
  source 1..4715: mol_type = other DNA
tacactactttaccaaaatcattaggggattcatcagttttttttttttttttttttttggttacatgcatcagtcaataatgctttttttattttttttatttttttagatgcctccacagcatgaatgtactactcctttttcttcccctcccaccctcattgcatcccaggcttcccctgctccccacccccatgacagacatttttgatgattatcaacagaaactttatttctcatcggttcaggaacaatcggagggtagatggaaagaggaagggagggaaagagggagggaggaagaatcctgcgaaaaggaagggccagactgagggagaagaaaaacatgttcggggcaaaagggtaattctcaagtggggaatgccaaatgaaggggtgcttacatgggggcacaaaattccaaatcagccacagtggggtgaggtgagtatgagacgcaggtgggttgaatgaaggaaagttagtaccacttagggctacaggaccctggggttcttctgtcagaggattggggttcaggtttcaggctttagggtgtaacatgggggggcccagtaggggctatgctggttgcatggggaggccccaggcccctccccaagggcccctccttttgggggaatctcactgacgaggcagagtcgttcactgtagtctggctgcagactctcagccagtcccttagacacaccactccaggcctaaagacagatatgtccaggtcaggggtcaattaggggcaggaagtaaaagaccgagctctgtgccaaaggagtactcatgatgtctgcaaccactgtaattgattacagaagggatacacaggctcctgggcccccaataccagttgccatctgcctcattcaatctataatctgcacttctgtgtgtgtctctctctgtatagtccatgccccatttggtcggccacatcctgacagttagtgcagggcctccttccctctcctctctgcccccacccccacactctgtctgtcttgctggcaggcagttggcagttgatagactgcagcatgcttatgacagcgttctcaccgaaaagttcccgtggtattcagtaacaagatcctctaggttcttcagggtgggaattcggggcatcgtcctgacaggggagaaagagggagcaggagcacataggttaaagcttttttatcacccttctcccagttgtcccatatgaaataaagtgattctgtgttctctgtgcctgtggcttccttccatcaccaaaccctcttgggtaatctctcattacttactgtctcatcctttactcctaaagaccctgcaaaaccctcctctgctattgtcagctaccgttcccctcatttttctgggcttctccaaatctcaccgttccagccagaaatacacacagagaaggctgataatcaatcccatggagccaacagagataaccacggcttccaatgcaaacaggaaaggattctctatagaaaaaagaaaagcaaagtggaccttatatttgttgtgcccctactacatgccaggcactggtgccaggcaccgcgctaaagacatactctctgtttaatcctcacaacagctcctgtgaggcaggaacaattacctccatcttacatcttaggaaacagaatccaagagtttagggatgtggccaaggccaaagaggtagtatgtggcacagcctagatccagctggttccaaagccatcttcaccttgcaggctctctaggaatgcttcagggaaatcctatacattctatagcccccttgagtacccctcagcctccttctcaatccactcccctactctaacaacacgctaacccaaccctacacagaaaaaccttgatttctagaggttggggttagacagtgtggagagatggggcaccaagtttaggggctttagtgacagggaagtggagcaaaagacagtggtgttagaaaggctggggtgttgggctcatggattgggtcatgtgggcccattttaccttttgaagtattgctcccccagtggattgggtggctccattcactccaatgctgagcacttccacagagtgggttaaagcggctccgaacacgaaacgtgtagcgtttctgcccatccacactaggcaaggagaacttatgtctataatccactgattgttccttgaggagaaagaggatgagggaaagtgggtgtctatgagagaagggagaattaaaacatactcctgaacacccaccagtgtcatctctgctactgcccagtttctctctcatctcttgactactcaagccacactgctcccttcactgacttgaatctaatgcctcccctctggatccccttaatggcttccttttgtttacttgtctatctggtatcaggaagagtatgggtagggaatccctaatgaaaactcactggtgtcaggaatggtggctcacgcctgtaatcccagcactttgggaggccgaggtgggcagatcacctgaggtcaggagttcaagaccagcctgaccaacatggcaaaaccctgtctttactaaaaatacaaaaattagccaggcatggttgtgcatgctcccagctacttgggaggctgaagcaggagaatcacttgaaccagggagacagaggtcgcagtgagcccaagatcgccccactgcactcaagcctgggcaacagagtgaggctctgtctcaaaaaaaaaaaaaaaagaaagaaagaaagaaaagaaaagaaaaaaagaaaactcactggagaaaataggggggaaaggagttggaggagggagggtagggggtgagcagagaagctgggaggcagagaacaggagcttgatattaggtccttctatctgtctggttgaatcctttagccctactttcttggccttagctgctacattcacgtccctagtcactcacagtccagctgtggtcccagtcagtccggtactgcaccaagtgctccaaacagtggttcaagaatctgttgttccagttcagttctagctgggattcactcagtttgtgaagtgttaggttctctggagcccaggggatcactggagatatgtgtgcatatgtggtcattcccctggcctagacaagtcaggatcctgaaggtagtgcccctaatacctcctcccttcccatcatgatcccctacctcctcttttctgcccatgtacccttatgataaaagaacactactctgtagactccaatgtcccacagtatccctggtctcttgaccctttctttccaaattacccagattctgcagttttagcatctgtgtggcctgtctcctgggttcccgtgggtcctggagctgaacaacaaatgtttggtagaggtggatctcctttttttgcaactgacagccagaagtgatttcttcagagaatagatagtggctgcacttctggactttatcattatccgagttcttgtacctagaggagaaaggttggaaggaagaggaacagtggggccaatctgggtactgcagatatccagagcctagcctcatctcccctcaaccgacttatgacttaccccaggagaaaacagtggggtacctgggagacttgctaccctctctcttggtctctgatccaacccacctcttcttcatcccctccccctcgtcccttctcataccaataatgcagagtgaggttggtaggctggggctcagagctgctgttccaagtgcaattcatgtactcgacattgaacacaaaacactgaacctctgggaggggcagagtggaaacactgagggagtcagtgggcatagtggtcaggaagaaatctagattggggagaaaatgaaggcagggagggaaagagaaatgatggtcagaaggaggaggccaagcacggtggctcatgtctgtaatcctggtgctttgaaaggctgaggcaggaggatcactagaggccaggagtttgagaccagcctaggcaacatagtgagaccctgcctcaaaagaaagaaagaaacaaacaaacaagaaagaaagaaagaagaagtagcgtgaggcagggaaccctcccccttgcccttcccactccacttttcaattctgcccacatgattgtaatggccagtggcaggcaccagatctctgtacggccccttcccacagccacccttctcaccagccccctccagtcccagatttcccaccagctgtggtgtcttcattcccattgggcgtcagaattgtcgtgttcagccccactcccagcaggggcagctgcaggaataagagggatgtgaatggtaatgatggcttcaacatggcgcttgctcttcattccctgggtgtagtctgtctgtgtcaggaacctgggtccctcacccactacccctccccacccacacgtttcctctgtcatagcttccggtggaaagaaccttataaaccagggctttacagagggtgtggcaaatatgtgctgtgtgacacgggctaagtcctctaggagattaggtgctgctgtaaggtggtaaacagaaactaaagctggatatacaatagtgtcacagactcaaaaatcctcagcccacctagatcctgggaaggatctgttcactgcggccgcatgttctttttttttttttttttttttttctgatgaatcccctaatgattttggtaaatattcgtc

SEQ ID NO: 525 - DNA, 251 bp, unidentified
  source 1..251: mol_type = other DNA
cacgtgtttaccaaaatcattaggggattcatcagtttctcgatcattattattttttggcgatcgcttttttttttttttttagcaaattggtaatactcctgcctccacagttttttttttttttttgcgatcgcctttttttttttttttttttttctgatgaatcccctaatgattttggtaaacacgtgttttttttttttttttttttcagctatatttaccaaaatcattaggggattcatcag

SEQ ID NO: 526 - DNA, 248 bp, unidentified
  source 1..248: mol_type = other DNA
ctgatgaatcccctaatgattttggtaaaagtatgaatttttttttttttttttatcatctttaccaaaatcattaggggattcatcagttttttttttttttttttttttggcgatcgcttttttttttttttttccttctcctctaaatcattaccttctataattttttttttttttttgcgatcgcctttttttttttttgatacatttctgatgaatcccctaatgattttggtaaagatgat

SEQ ID NO: 527 - DNA, 4714 bp, unidentified
  source 1..4714: mol_type = other DNA
ttcatacttttaccaaaatcattaggggattcatcagttttttttttttttttttttttgaacatgcggccgcgtgaacagatccttcccaggatctaggtgggctgaggatttttgagtctgtgacactattgtatatccagctttagtttctgtttaccaccttacagcagcacctaatctcctagaggacttagcccgtgtcacacagcacatatttgccacaccctctgtaaagccctggtttataaggttctttccaccggaagctatgacagaggaaacgtgtgggtggggaggggtagtgggtgagggacccaggttcctgacacagacagactacacccagggaatgaagagcaagcgccatgttgaagccatcattaccattcacatccctcttattcctgcagctgcccctgctgggagtggggctgaacacgacaattctgacgcccaatgggaatgaagacaccacagctggtgggaaatctgggactggagggggctggtgagaagggtggctgtgggaaggggccgtacagagatctggtgcctgccactggccattacaatcatgtgggcagaattgaaaagtggagtgggaagggcaagggggagggttccctgcctcacgctacttcttctttctttctttcttgtttgtttgtttctttctttcttttgaggcagggtctcactatgttgcctaggctggtctcaaactcctggcctctagtgatcctcctgcctcagcctttcaaagcaccaggattacagacatgagccaccgtgcttggcctcctccttctgaccatcatttctctttccctccctgccttcattttctccccaatctagatttcttcctgaccactatgcccactgactccctcagtgtttccactctgcccctcccagaggttcagtgttttgtgttcaatgtcgagtacatgaattgcacttggaacagcagctctgagccccagcctaccaacctcactctgcattattggtatgagaagggacgagggggaggggatgaagaagaggtgggttggatcagagaccaagagagagggtagcaagtctcccaggtaccccactgttttctcctggggtaagtcataagtcggttgaggggagatgaggctaggctctggatatctgcagtacccagattggccccactgttcctcttccttccaacctttctcctctaggtacaagaactcggataatgataaagtccagaagtgcagccactatctattctctgaagaaatcacttctggctgtcagttgcaaaaaaaggagatccacctctaccaaacatttgttgttcagctccaggacccacgggaacccaggagacaggccacacagatgctaaaactgcagaatctgggtaatttggaaagaaagggtcaagagaccagggatactgtgggacattggagtctacagagtagtgttcttttatcataagggtacatgggcagaaaagaggaggtaggggatcatgatgggaagggaggaggtattaggggcactaccttcaggatcctgacttgtctaggccaggggaatgaccacatatgcacacatatctccagtgatcccctgggctccagagaacctaacacttcacaaactgagtgaatcccagctagaactgaactggaacaacagattcttgaaccactgtttggagcacttggtgcagtaccggactgactgggaccacagctggactgtgagtgactagggacgtgaatgtagcagctaaggccaagaaagtagggctaaaggattcaaccagacagatagaaggacctaatatcaagctcctgttctctgcctcccagcttctctgctcaccccctaccctccctcctccaactcctttcccccctattttctccagtgagttttctttttttcttttcttttctttctttctttcttttttttttttttttgagacagagcctcactctgttgcccaggcttgagtgcagtggggcgatcttgggctcactgcgacctctgtctccctggttcaagtgattctcctgcttcagcctcccaagtagctgggagcatgcacaaccatgcctggctaatttttgtatttttagtaaagacagggttttgccatgttggtcaggctggtcttgaactcctgacctcaggtgatctgcccacctcggcctcccaaagtgctgggattacaggcgtgagccaccattcctgacaccagtgagttttcattagggattccctacccatactcttcctgataccagatagacaagtaaacaaaaggaagccattaaggggatccagaggggaggcattagattcaagtcagtgaagggagcagtgtggcttgagtagtcaagagatgagagagaaactgggcagtagcagagatgacactggtgggtgttcaggagtatgttttaattctcccttctctcatagacacccactttccctcatcctctttctcctcaaggaacaatcagtggattatagacataagttctccttgcctagtgtggatgggcagaaacgctacacgtttcgtgttcggagccgctttaacccactctgtggaagtgctcagcattggagtgaatggagccacccaatccactgggggagcaatacttcaaaaggtaaaatgggcccacatgacccaatccatgagcccaacaccccagcctttctaacaccactgtcttttgctccacttccctgtcactaaagcccctaaacttggtgccccatctctccacactgtctaaccccaacctctagaaatcaaggtttttctgtgtagggttgggttagcgtgttgttagagtaggggagtggattgagaaggaggctgaggggtactcaagggggctatagaatgtataggatttccctgaagcattcctagagagcctgcaaggtgaagatggctttggaaccagctggatctaggctgtgccacatactacctctttggccttggccacatccctaaactcttggattctgtttcctaagatgtaagatggaggtaattgttcctgcctcacaggagctgttgtgaggattaaacagagagtatgtctttagcgcggtgcctggcaccagtgcctggcatgtagtaggggcacaacaaatataaggtccactttgcttttcttttttctatagagaatcctttcctgtttgcattggaagccgtggttatctctgttggctccatgggattgattatcagccttctctgtgtgtatttctggctggaacggtgagatttggagaagcccagaaaaatgaggggaacggtagctgacaatagcagaggagggttttgcagggtctttaggagtaaaggatgagacagtaagtaatgagagattacccaagagggtttggtgatggaaggaagccacaggcacagagaacacagaatcactttatttcatatgggacaactgggagaagggtgataaaaaagctttaacctatgtgctcctgctccctctttctcccctgtcaggacgatgccccgaattcccaccctgaagaacctagaggatcttgttactgaataccacgggaacttttcggtgagaacgctgtcataagcatgctgcagtctatcaactgccaactgcctgccagcaagacagacagagtgtgggggtgggggcagagaggagagggaaggaggccctgcactaactgtcaggatgtggccgaccaaatggggcatggactatacagagagagacacacacagaagtgcagattatagattgaatgaggcagatggcaactggtattgggggcccaggagcctgtgtatcccttctgtaatcaattacagtggttgcagacatcatgagtactcctttggcacagagctcggtcttttacttcctgcccctaattgacccctgacctggacatatctgtctttaggcctggagtggtgtgtctaagggactggctgagagtctgcagccagactacagtgaacgactctgcctcgtcagtgagattcccccaaaaggaggggcccttggggaggggcctggggcctccccatgcaaccagcatagcccctactgggcccccccatgttacaccctaaagcctgaaacctgaaccccaatcctctgacagaagaaccccagggtcctgtagccctaagtggtactaactttccttcattcaacccacctgcgtctcatactcacctcaccccactgtggctgatttggaattttgtgcccccatgtaagcaccccttcatttggcattccccacttgagaattacccttttgccccgaacatgtttttcttctccctcagtctggcccttccttttcgcaggattcttcctccctccctctttccctcccttcctctttccatctaccctccgattgttcctgaaccgatgagaaataaagtttctgttgataatcatcaaaaatgtctgtcatgggggtggggagcaggggaagcctgggatgcaatgagggtgggaggggaagaaaaaggagtagtacattcatgctgtggaggcatctaaaaaaataaaaaaaataaaaaaagcattattgactgatgcatgtaacctttttttttttttttttttttttctgatgaatcccctaatgattttggtaaatatagctg

SEQ ID NO: 528 - DNA, 248 bp, unidentified
  source 1..248: mol_type = other DNA
tttaccaaaatcattaggggattcatcaggtagtgtatttttttttttttttttatcatcctgatgaatcccctaatgattttggtaaattttttttttttttttttttttggcgatcgcttttttttttttttttgctagaaagagtactgttctggaaactgacttttttttttttttttgcgatcgcctttttttttttttgatacattttttaccaaaatcattaggggattcatcaggatgat

SEQ ID NO: 529 - DNA, 251 bp, unidentified
  source 1..251: mol_type = other DNA
cacgtgctgatgaatcccctaatgattttggtaaatttctcgatcattattattttttggcgatcgcttttttttttttttttgttgagaatggtgctagtggtagtgaacagttttttttttttttttgcgatcgccttttttttttttttttttttttttaccaaaatcattaggggattcatcagcacgtgttttttttttttttttttttgacgaatactgatgaatcccctaatgattttggtaaa

SEQ ID NO: 530 - DNA, 4715 bp, unidentified
  source 1..4715: mol_type = other DNA
tacactacctgatgaatcccctaatgattttggtaaattttttttttttttttttttttggttacatgcatcagtcaataatgctttttttattttttttatttttttagatgcctccacagcatgaatgtactactcctttttcttcccctcccaccctcattgcatcccaggcttcccctgctccccacccccatgacagacatttttgatgattatcaacagaaactttatttctcatcggttcaggaacaatcggagggtagatggaaagaggaagggagggaaagagggagggaggaagaatcctgcgaaaaggaagggccagactgagggagaagaaaaacatgttcggggcaaaagggtaattctcaagtggggaatgccaaatgaaggggtgcttacatgggggcacaaaattccaaatcagccacagtggggtgaggtgagtatgagacgcaggtgggttgaatgaaggaaagttagtaccacttagggctacaggaccctggggttcttctgtcagaggattggggttcaggtttcaggctttagggtgtaacatgggggggcccagtaggggctatgctggttgcatggggaggccccaggcccctccccaagggcccctccttttgggggaatctcactgacgaggcagagtcgttcactgtagtctggctgcagactctcagccagtcccttagacacaccactccaggcctaaagacagatatgtccaggtcaggggtcaattaggggcaggaagtaaaagaccgagctctgtgccaaaggagtactcatgatgtctgcaaccactgtaattgattacagaagggatacacaggctcctgggcccccaataccagttgccatctgcctcattcaatctataatctgcacttctgtgtgtgtctctctctgtatagtccatgccccatttggtcggccacatcctgacagttagtgcagggcctccttccctctcctctctgcccccacccccacactctgtctgtcttgctggcaggcagttggcagttgatagactgcagcatgcttatgacagcgttctcaccgaaaagttcccgtggtattcagtaacaagatcctctaggttcttcagggtgggaattcggggcatcgtcctgacaggggagaaagagggagcaggagcacataggttaaagcttttttatcacccttctcccagttgtcccatatgaaataaagtgattctgtgttctctgtgcctgtggcttccttccatcaccaaaccctcttgggtaatctctcattacttactgtctcatcctttactcctaaagaccctgcaaaaccctcctctgctattgtcagctaccgttcccctcatttttctgggcttctccaaatctcaccgttccagccagaaatacacacagagaaggctgataatcaatcccatggagccaacagagataaccacggcttccaatgcaaacaggaaaggattctctatagaaaaaagaaaagcaaagtggaccttatatttgttgtgcccctactacatgccaggcactggtgccaggcaccgcgctaaagacatactctctgtttaatcctcacaacagctcctgtgaggcaggaacaattacctccatcttacatcttaggaaacagaatccaagagtttagggatgtggccaaggccaaagaggtagtatgtggcacagcctagatccagctggttccaaagccatcttcaccttgcaggctctctaggaatgcttcagggaaatcctatacattctatagcccccttgagtacccctcagcctccttctcaatccactcccctactctaacaacacgctaacccaaccctacacagaaaaaccttgatttctagaggttggggttagacagtgtggagagatggggcaccaagtttaggggctttagtgacagggaagtggagcaaaagacagtggtgttagaaaggctggggtgttgggctcatggattgggtcatgtgggcccattttaccttttgaagtattgctcccccagtggattgggtggctccattcactccaatgctgagcacttccacagagtgggttaaagcggctccgaacacgaaacgtgtagcgtttctgcccatccacactaggcaaggagaacttatgtctataatccactgattgttccttgaggagaaagaggatgagggaaagtgggtgtctatgagagaagggagaattaaaacatactcctgaacacccaccagtgtcatctctgctactgcccagtttctctctcatctcttgactactcaagccacactgctcccttcactgacttgaatctaatgcctcccctctggatccccttaatggcttccttttgtttacttgtctatctggtatcaggaagagtatgggtagggaatccctaatgaaaactcactggtgtcaggaatggtggctcacgcctgtaatcccagcactttgggaggccgaggtgggcagatcacctgaggtcaggagttcaagaccagcctgaccaacatggcaaaaccctgtctttactaaaaatacaaaaattagccaggcatggttgtgcatgctcccagctacttgggaggctgaagcaggagaatcacttgaaccagggagacagaggtcgcagtgagcccaagatcgccccactgcactcaagcctgggcaacagagtgaggctctgtctcaaaaaaaaaaaaaaaagaaagaaagaaagaaaagaaaagaaaaaaagaaaactcactggagaaaataggggggaaaggagttggaggagggagggtagggggtgagcagagaagctgggaggcagagaacaggagcttgatattaggtccttctatctgtctggttgaatcctttagccctactttcttggccttagctgctacattcacgtccctagtcactcacagtccagctgtggtcccagtcagtccggtactgcaccaagtgctccaaacagtggttcaagaatctgttgttccagttcagttctagctgggattcactcagtttgtgaagtgttaggttctctggagcccaggggatcactggagatatgtgtgcatatgtggtcattcccctggcctagacaagtcaggatcctgaaggtagtgcccctaatacctcctcccttcccatcatgatcccctacctcctcttttctgcccatgtacccttatgataaaagaacactactctgtagactccaatgtcccacagtatccctggtctcttgaccctttctttccaaattacccagattctgcagttttagcatctgtgtggcctgtctcctgggttcccgtgggtcctggagctgaacaacaaatgtttggtagaggtggatctcctttttttgcaactgacagccagaagtgatttcttcagagaatagatagtggctgcacttctggactttatcattatccgagttcttgtacctagaggagaaaggttggaaggaagaggaacagtggggccaatctgggtactgcagatatccagagcctagcctcatctcccctcaaccgacttatgacttaccccaggagaaaacagtggggtacctgggagacttgctaccctctctcttggtctctgatccaacccacctcttcttcatcccctccccctcgtcccttctcataccaataatgcagagtgaggttggtaggctggggctcagagctgctgttccaagtgcaattcatgtactcgacattgaacacaaaacactgaacctctgggaggggcagagtggaaacactgagggagtcagtgggcatagtggtcaggaagaaatctagattggggagaaaatgaaggcagggagggaaagagaaatgatggtcagaaggaggaggccaagcacggtggctcatgtctgtaatcctggtgctttgaaaggctgaggcaggaggatcactagaggccaggagtttgagaccagcctaggcaacatagtgagaccctgcctcaaaagaaagaaagaaacaaacaaacaagaaagaaagaaagaagaagtagcgtgaggcagggaaccctcccccttgcccttcccactccacttttcaattctgcccacatgattgtaatggccagtggcaggcaccagatctctgtacggccccttcccacagccacccttctcaccagccccctccagtcccagatttcccaccagctgtggtgtcttcattcccattgggcgtcagaattgtcgtgttcagccccactcccagcaggggcagctgcaggaataagagggatgtgaatggtaatgatggcttcaacatggcgcttgctcttcattccctgggtgtagtctgtctgtgtcaggaacctgggtccctcacccactacccctccccacccacacgtttcctctgtcatagcttccggtggaaagaaccttataaaccagggctttacagagggtgtggcaaatatgtgctgtgtgacacgggctaagtcctctaggagattaggtgctgctgtaaggtggtaaacagaaactaaagctggatatacaatagtgtcacagactcaaaaatcctcagcccacctagatcctgggaaggatctgttcactgcggccgcatgttcttttttttttttttttttttttttttaccaaaatcattaggggattcatcagtattcgtc

SEQ ID NO: 531 - DNA, 251 bp, unidentified
  source 1..251: mol_type = other DNA
cacgtgctgatgaatcccctaatgattttggtaaatttctcgatcattattattttttggcgatcgcttttttttttttttttagcaaattggtaatactcctgcctccacagttttttttttttttttgcgatcgccttttttttttttttttttttttttaccaaaatcattaggggattcatcagcacgtgttttttttttttttttttttcagctatactgatgaatcccctaatgattttggtaaa

SEQ ID NO: 532 - DNA, 248 bp, unidentified
  source 1..248: mol_type = other DNA
tttaccaaaatcattaggggattcatcagagtatgaatttttttttttttttttatcatcctgatgaatcccctaatgattttggtaaattttttttttttttttttttttggcgatcgcttttttttttttttttccttctcctctaaatcattaccttctataattttttttttttttttgcgatcgcctttttttttttttgatacattttttaccaaaatcattaggggattcatcaggatgat

SEQ ID NO: 533 - DNA, 4714 bp, unidentified
  source 1..4714: mol_type = other DNA
ttcatactctgatgaatcccctaatgattttggtaaattttttttttttttttttttttgaacatgcggccgcgtgaacagatccttcccaggatctaggtgggctgaggatttttgagtctgtgacactattgtatatccagctttagtttctgtttaccaccttacagcagcacctaatctcctagaggacttagcccgtgtcacacagcacatatttgccacaccctctgtaaagccctggtttataaggttctttccaccggaagctatgacagaggaaacgtgtgggtggggaggggtagtgggtgagggacccaggttcctgacacagacagactacacccagggaatgaagagcaagcgccatgttgaagccatcattaccattcacatccctcttattcctgcagctgcccctgctgggagtggggctgaacacgacaattctgacgcccaatgggaatgaagacaccacagctggtgggaaatctgggactggagggggctggtgagaagggtggctgtgggaaggggccgtacagagatctggtgcctgccactggccattacaatcatgtgggcagaattgaaaagtggagtgggaagggcaagggggagggttccctgcctcacgctacttcttctttctttctttcttgtttgtttgtttctttctttcttttgaggcagggtctcactatgttgcctaggctggtctcaaactcctggcctctagtgatcctcctgcctcagcctttcaaagcaccaggattacagacatgagccaccgtgcttggcctcctccttctgaccatcatttctctttccctccctgccttcattttctccccaatctagatttcttcctgaccactatgcccactgactccctcagtgtttccactctgcccctcccagaggttcagtgttttgtgttcaatgtcgagtacatgaattgcacttggaacagcagctctgagccccagcctaccaacctcactctgcattattggtatgagaagggacgagggggaggggatgaagaagaggtgggttggatcagagaccaagagagagggtagcaagtctcccaggtaccccactgttttctcctggggtaagtcataagtcggttgaggggagatgaggctaggctctggatatctgcagtacccagattggccccactgttcctcttccttccaacctttctcctctaggtacaagaactcggataatgataaagtccagaagtgcagccactatctattctctgaagaaatcacttctggctgtcagttgcaaaaaaaggagatccacctctaccaaacatttgttgttcagctccaggacccacgggaacccaggagacaggccacacagatgctaaaactgcagaatctgggtaatttggaaagaaagggtcaagagaccagggatactgtgggacattggagtctacagagtagtgttcttttatcataagggtacatgggcagaaaagaggaggtaggggatcatgatgggaagggaggaggtattaggggcactaccttcaggatcctgacttgtctaggccaggggaatgaccacatatgcacacatatctccagtgatcccctgggctccagagaacctaacacttcacaaactgagtgaatcccagctagaactgaactggaacaacagattcttgaaccactgtttggagcacttggtgcagtaccggactgactgggaccacagctggactgtgagtgactagggacgtgaatgtagcagctaaggccaagaaagtagggctaaaggattcaaccagacagatagaaggacctaatatcaagctcctgttctctgcctcccagcttctctgctcaccccctaccctccctcctccaactcctttcccccctattttctccagtgagttttctttttttcttttcttttctttctttctttcttttttttttttttttgagacagagcctcactctgttgcccaggcttgagtgcagtggggcgatcttgggctcactgcgacctctgtctccctggttcaagtgattctcctgcttcagcctcccaagtagctgggagcatgcacaaccatgcctggctaatttttgtatttttagtaaagacagggttttgccatgttggtcaggctggtcttgaactcctgacctcaggtgatctgcccacctcggcctcccaaagtgctgggattacaggcgtgagccaccattcctgacaccagtgagttttcattagggattccctacccatactcttcctgataccagatagacaagtaaacaaaaggaagccattaaggggatccagaggggaggcattagattcaagtcagtgaagggagcagtgtggcttgagtagtcaagagatgagagagaaactgggcagtagcagagatgacactggtgggtgttcaggagtatgttttaattctcccttctctcatagacacccactttccctcatcctctttctcctcaaggaacaatcagtggattatagacataagttctccttgcctagtgtggatgggcagaaacgctacacgtttcgtgttcggagccgctttaacccactctgtggaagtgctcagcattggagtgaatggagccacccaatccactgggggagcaatacttcaaaaggtaaaatgggcccacatgacccaatccatgagcccaacaccccagcctttctaacaccactgtcttttgctccacttccctgtcactaaagcccctaaacttggtgccccatctctccacactgtctaaccccaacctctagaaatcaaggtttttctgtgtagggttgggttagcgtgttgttagagtaggggagtggattgagaaggaggctgaggggtactcaagggggctatagaatgtataggatttccctgaagcattcctagagagcctgcaaggtgaagatggctttggaaccagctggatctaggctgtgccacatactacctctttggccttggccacatccctaaactcttggattctgtttcctaagatgtaagatggaggtaattgttcctgcctcacaggagctgttgtgaggattaaacagagagtatgtctttagcgcggtgcctggcaccagtgcctggcatgtagtaggggcacaacaaatataaggtccactttgcttttcttttttctatagagaatcctttcctgtttgcattggaagccgtggttatctctgttggctccatgggattgattatcagccttctctgtgtgtatttctggctggaacggtgagatttggagaagcccagaaaaatgaggggaacggtagctgacaatagcagaggagggttttgcagggtctttaggagtaaaggatgagacagtaagtaatgagagattacccaagagggtttggtgatggaaggaagccacaggcacagagaacacagaatcactttatttcatatgggacaactgggagaagggtgataaaaaagctttaacctatgtgctcctgctccctctttctcccctgtcaggacgatgccccgaattcccaccctgaagaacctagaggatcttgttactgaataccacgggaacttttcggtgagaacgctgtcataagcatgctgcagtctatcaactgccaactgcctgccagcaagacagacagagtgtgggggtgggggcagagaggagagggaaggaggccctgcactaactgtcaggatgtggccgaccaaatggggcatggactatacagagagagacacacacagaagtgcagattatagattgaatgaggcagatggcaactggtattgggggcccaggagcctgtgtatcccttctgtaatcaattacagtggttgcagacatcatgagtactcctttggcacagagctcggtcttttacttcctgcccctaattgacccctgacctggacatatctgtctttaggcctggagtggtgtgtctaagggactggctgagagtctgcagccagactacagtgaacgactctgcctcgtcagtgagattcccccaaaaggaggggcccttggggaggggcctggggcctccccatgcaaccagcatagcccctactgggcccccccatgttacaccctaaagcctgaaacctgaaccccaatcctctgacagaagaaccccagggtcctgtagccctaagtggtactaactttccttcattcaacccacctgcgtctcatactcacctcaccccactgtggctgatttggaattttgtgcccccatgtaagcaccccttcatttggcattccccacttgagaattacccttttgccccgaacatgtttttcttctccctcagtctggcccttccttttcgcaggattcttcctccctccctctttccctcccttcctctttccatctaccctccgattgttcctgaaccgatgagaaataaagtttctgttgataatcatcaaaaatgtctgtcatgggggtggggagcaggggaagcctgggatgcaatgagggtgggaggggaagaaaaaggagtagtacattcatgctgtggaggcatctaaaaaaataaaaaaaataaaaaaagcattattgactgatgcatgtaaccttttttttttttttttttttttttttaccaaaatcattaggggattcatcagtatagctg

SEQ ID NO: 534 - DNA, 242 bp, unidentified
  source 1..242: mol_type = other DNA
ctgatgaatcccctaatgattttggtaaagtagtgtatttttttttttttttttatcatctttaccaaaatcattaggggattcatcagttttttttttttttttttttttgcgaccttttttttttttttttgctagaaagagtactgttctggaaactgacttttttttttttttttggtcgctttttttttttttgatacatttctgatgaatcccctaatgattttggtaaagatgat

SEQ ID NO: 535 - DNA, 244 bp, unidentified
  source 1..244: mol_type = other DNA
cacgtgtttaccaaaatcattaggggattcatcagtttctcgatcattattattttttgcgaccttttttttttttttttgttgagaatggtgctagtggtagtgaacagtttttttttttttttggtcgctttttttttttttttttttttctgatgaatcccctaatgattttggtaaacacgtgttttttttttttttttttttgacgaatatttaccaaaatcattaggggattcatcag

SEQ ID NO: 536 - DNA, 4715 bp, unidentified; identical to SEQ ID NO: 524
  source 1..4715: mol_type = other DNA

SEQ ID NO: 537 - DNA, 245 bp, unidentified
  source 1..245: mol_type = other DNA
cacgtgtttaccaaaatcattaggggattcatcagtttctcgatcattattattttttgcgaccttttttttttttttttagcaaattggtaatactcctgcctccacagttttttttttttttttggtcgctttttttttttttttttttttctgatgaatcccctaatgattttggtaaacacgtgttttttttttttttttttttcagctatatttaccaaaatcattaggggattcatcag

SEQ ID NO: 538 - DNA, 242 bp, unidentified
  source 1..242: mol_type = other DNA
ctgatgaatcccctaatgattttggtaaaagtatgaatttttttttttttttttatcatctttaccaaaatcattaggggattcatcagttttttttttttttttttttttgcgaccttttttttttttttttccttctcctctaaatcattaccttctataattttttttttttttttggtcgctttttttttttttgatacatttctgatgaatcccctaatgattttggtaaagatgat

SEQ ID NO: 539 - DNA, 4714 bp, unidentified; identical to SEQ ID NO: 527
  source 1..4714: mol_type = other DNA

SEQ ID NO: 540 - DNA, 242 bp, unidentified
  source 1..242: mol_type = other DNA
tttaccaaaatcattaggggattcatcaggtagtgtatttttttttttttttttatcatcctgatgaatcccctaatgattttggtaaattttttttttttttttttttttgcgaccttttttttttttttttgctagaaagagtactgttctggaaactgacttttttttttttttttggtcgctttttttttttttgatacattttttaccaaaatcattaggggattcatcaggatgat

SEQ ID NO: 541 - DNA, 245 bp, unidentified
  source 1..245: mol_type = other DNA
cacgtgctgatgaatcccctaatgattttggtaaatttctcgatcattattattttttgcgaccttttttttttttttttgttgagaatggtgctagtggtagtgaacagttttttttttttttttggtcgcttttttttttttttttttttttttaccaaaatcattaggggattcatcagcacgtgttttttttttttttttttttgacgaatactgatgaatcccctaatgattttggtaaa

SEQ ID NO: 542 - DNA, 4715 bp, unidentified; identical to SEQ ID NO: 530
  source 1..4715: mol_type = other DNA

SEQ ID NO: 543 - DNA, 245 bp, unidentified
  source 1..245: mol_type = other DNA
cacgtgctgatgaatcccctaatgattttggtaaatttctcgatcattattattttttgcgaccttttttttttttttttagcaaattggtaatactcctgcctccacagttttttttttttttttggtcgcttttttttttttttttttttttttaccaaaatcattaggggattcatcagcacgtgttttttttttttttttttttcagctatactgatgaatcccctaatgattttggtaaa

SEQ ID NO: 544 - DNA, 242 bp, unidentified
  source 1..242: mol_type = other DNA
tttaccaaaatcattaggggattcatcagagtatgaatttttttttttttttttatcatcctgatgaatcccctaatgattttggtaaattttttttttttttttttttttgcgaccttttttttttttttttccttctcctctaaatcattaccttctataattttttttttttttttggtcgctttttttttttttgatacattttttaccaaaatcattaggggattcatcaggatgat

SEQ ID NO: 545 - DNA, 4714 bp, unidentified; identical to SEQ ID NO: 533
  source 1..4714: mol_type = other DNA

SEQ ID NO: 546 - DNA, 254 bp, unidentified
  source 1..254: mol_type = other DNA
ctgatgaatcccctaatgattttggtaaagtagtgtatttttttttttttttttatcatctttaccaaaatcattaggggattcatcagttttttttttttttttttttttgcggcgatcggcttttttttttttttttgctagaaagagtactgttctggaaactgacttttttttttttttttgccgatcgccgctttttttttttttgatacatttctgatgaatcccctaatgattttggtaaagatgat

SEQ ID NO: 547 - DNA, 257 bp, unidentified
  source 1..257: mol_type = other DNA
cacgtgtttaccaaaatcattaggggattcatcagtttctcgatcattattattttttgcggcgatcggcttttttttttttttttgttgagaatggtgctagtggtagtgaacagttttttttttttttttgccgatcgccgctttttttttttttttttttttctgatgaatcccctaatgattttggtaaacacgtgttttttttttttttttttttgacgaatatttaccaaaatcattaggggattcatcag

SEQ ID NO: 548 - DNA, 4715 bp, unidentified; identical to SEQ ID NO: 524
  source 1..4715: mol_type = other DNA

SEQ ID NO: 549 - DNA, 257 bp, unidentified
  source 1..257: mol_type = other DNA
cacgtgtttaccaaaatcattaggggattcatcagtttctcgatcattattattttttgcggcgatcggcttttttttttttttttagcaaattggtaatactcctgcctccacagttttttttttttttttgccgatcgccgctttttttttttttttttttttctgatgaatcccctaatgattttggtaaacacgtgttttttttttttttttttttcagctatatttaccaaaatcattaggggattcatcag

SEQ ID NO: 550 - DNA, 254 bp, unidentified
  source 1..254: mol_type = other DNA
ctgatgaatcccctaatgattttggtaaaagtatgaatttttttttttttttttatcatctttaccaaaatcattaggggattcatcagttttttttttttttttttttttgcggcgatcggcttttttttttttttttccttctcctctaaatcattaccttctataattttttttttttttttgccgatcgccgctttttttttttttgatacatttctgatgaatcccctaatgattttggtaaagatgat

SEQ ID NO: 551 - DNA, 4714 bp, unidentified; identical to SEQ ID NO: 527
  source 1..4714: mol_type = other DNA

SEQ ID NO: 552 - DNA, 254 bp, unidentified
  source 1..254: mol_type = other DNA
tttaccaaaatcattaggggattcatcaggtagtgtatttttttttttttttttatcatcctgatgaatcccctaatgattttggtaaattttttttttttttttttttttgcggcgatcggcttttttttttttttttgctagaaagagtactgttctggaaactgacttttttttttttttttgccgatcgccgctttttttttttttgatacattttttaccaaaatcattaggggattcatcaggatgat

SEQ ID NO: 553 - DNA, 257 bp, unidentified
  source 1..257: mol_type = other DNA
cacgtgctgatgaatcccctaatgattttggtaaatttctcgatcattattattttttgcggcgatcggcttttttttttttttttgttgagaatggtgctagtggtagtgaacagttttttttttttttttgccgatcgccgcttttttttttttttttttttttttaccaaaatcattaggggattcatcagcacgtgttttttttttttttttttttgacgaatactgatgaatcccctaatgattttggtaaa

SEQ ID NO: 554 - DNA, 4715 bp, unidentified; identical to SEQ ID NO: 530
  source 1..4715: mol_type = other DNA

SEQ ID NO: 555 - DNA, 257 bp, unidentified
  source 1..257: mol_type = other DNA
cacgtgctgatgaatcccctaatgattttggtaaatttctcgatcattattattttttgcggcgatcggcttttttttttttttttagcaaattggtaatactcctgcctccacagttttttttttttttttgccgatcgccgcttttttttttttttttttttttttaccaaaatcattaggggattcatcagcacgtgttttttttttttttttttttcagctatactgatgaatcccctaatgattttggtaaa

SEQ ID NO: 556 - DNA, 254 bp, unidentified
  source 1..254: mol_type = other DNA
tttaccaaaatcattaggggattcatcagagtatgaatttttttttttttttttatcatcctgatgaatcccctaatgattttggtaaattttttttttttttttttttttgcggcgatcggcttttttttttttttttccttctcctctaaatcattaccttctataattttttttttttttttgccgatcgccgctttttttttttttgatacattttttaccaaaatcattaggggattcatcaggatgat

SEQ ID NO: 557 - DNA, 4714 bp, unidentified; identical to SEQ ID NO: 533
  source 1..4714: mol_type = other DNA

SEQ ID NO: 558 - DNA, 248 bp, unidentified
  source 1..248: mol_type = other DNA
ctgagagatcccctcataatttccccaaagtagtgtatttttttttttttttttatcatctttggggaaattatgaggggatctctcagttttttttttttttttttttttggcgatcgcttttttttttttttttgctagaaagagtactgttctggaaactgacttttttttttttttttgcgatcgcctttttttttttttgatacatttctgagagatcccctcataatttccccaaagatgat

SEQ ID NO: 559 - DNA, 251 bp, unidentified
  source 1..251: mol_type = other DNA
cacgtgtttggggaaattatgaggggatctctcagtttctcgatcattattattttttggcgatcgcttttttttttttttttgttgagaatggtgctagtggtagtgaacagttttttttttttttttgcgatcgcctttttttttttttttttttttctgagagatcccctcataatttccccaaacacgtgttttttttttttttttttttgacgaatatttggggaaattatgaggggatctctcag

SEQ ID NO: 560 - DNA, 4715 bp, unidentified
  source 1..4715: mol_type = other DNA
tacactactttggggaaattatgaggggatctctcagttttttttttttttttttttttggttacatgcatcagtcaataatgctttttttattttttttatttttttagatgcctccacagcatgaatgtactactcctttttcttcccctcccaccctcattgcatcccaggcttcccctgctccccacccccatgacagacatttttgatgattatcaacagaaactttatttctcatcggttcaggaacaatcggagggtagatggaaagaggaagggagggaaagagggagggaggaagaatcctgcgaaaaggaagggccagactgagggagaagaaaaacatgttcggggcaaaagggtaattctcaagtggggaatgccaaatgaaggggtgcttacatgggggcacaaaattccaaatcagccacagtggggtgaggtgagtatgagacgcaggtgggttgaatgaaggaaagttagtaccacttagggctacaggaccctggggttcttctgtcagaggattggggttcaggtttcaggctttagggtgtaacatgggggggcccagtaggggctatgctggttgcatggggaggccccaggcccctccccaagggcccctccttttgggggaatctcactgacgaggcagagtcgttcactgtagtctggctgcagactctcagccagtcccttagacacaccactccaggcctaaagacagatatgtccaggtcaggggtcaattaggggcaggaagtaaaagaccgagctctgtgccaaaggagtactcatgatgtctgcaaccactgtaattgattacagaagggatacacaggctcctgggcccccaataccagttgccatctgcctcattcaatctataatctgcacttctgtgtgtgtctctctctgtatagtccatgccccatttggtcggccacatcctgacagttagtgcagggcctccttccctctcctctctgcccccacccccacactctgtctgtcttgctggcaggcagttggcagttgatagactgcagcatgcttatgacagcgttctcaccgaaaagttcccgtggtattcagtaacaagatcctctaggttcttcagggtgggaattcggggcatcgtcctgacaggggagaaagagggagcaggagcacataggttaaagcttttttatcacccttctcccagttgtcccatatgaaataaagtgattctgtgttctctgtgcctgtggcttccttccatcaccaaaccctcttgggtaatctctcattacttactgtctcatcctttactcctaaagaccctgcaaaaccctcctctgctattgtcagctaccgttcccctcatttttctgggcttctccaaatctcaccgttccagccagaaatacacacagagaaggctgataatcaatcccatggagccaacagagataaccacggcttccaatgcaaacaggaaaggattctctatagaaaaaagaaaagcaaagtggaccttatatttgttgtgcccctactacatgccaggcactggtgccaggcaccgcgctaaagacatactctctgtttaatcctcacaacagctcctgtgaggcaggaacaattacctccatcttacatcttaggaaacagaatccaagagtttagggatgtggccaaggccaaagaggtagtatgtggcacagcctagatccagctggttccaaagccatcttcaccttgcaggctctctaggaatgcttcagggaaatcctatacattctatagcccccttgagtacccctcagcctccttctcaatccactcccctactctaacaacacgctaacccaaccctacacagaaaaaccttgatttctagaggttggggttagacagtgtggagagatggggcaccaagtttaggggctttagtgacagggaagtggagcaaaagacagtggtgttagaaaggctggggtgttgggctcatggattgggtcatgtgggcccattttaccttttgaagtattgctcccccagtggattgggtggctccattcactccaatgctgagcacttccacagagtgggttaaagcggctccgaacacgaaacgtgtagcgtttctgcccatccacactaggcaaggagaacttatgtctataatccactgattgttccttgaggagaaagaggatgagggaaagtgggtgtctatgagagaagggagaattaaaacatactcctgaacacccaccagtgtcatctctgctactgcccagtttctctctcatctcttgactactcaagccacactgctcccttcactgacttgaatctaatgcctcccctctggatccccttaatggcttccttttgtttacttgtctatctggtatcaggaagagtatgggtagggaatccctaatgaaaactcactggtgtcaggaatggtggctcacgcctgtaatcccagcactttgggaggccgaggtgggcagatcacctgaggtcaggagttcaagaccagcctgaccaacatggcaaaaccctgtctttactaaaaatacaaaaattagccaggcatggttgtgcatgctcccagctacttgggaggctgaagcaggagaatcacttgaaccagggagacagaggtcgcagtgagcccaagatcgccccactgcactcaagcctgggcaacagagtgaggctctgtctcaaaaaaaaaaaaaaaagaaagaaagaaagaaaagaaaagaaaaaaagaaaactcactggagaaaataggggggaaaggagttggaggagggagggtagggggtgagcagagaagctgggaggcagagaacaggagcttgatattaggtccttctatctgtctggttgaatcctttagccctactttcttggccttagctgctacattcacgtccctagtcactcacagtccagctgtggtcccagtcagtccggtactgcaccaagtgctccaaacagtggttcaagaatctgttgttccagttcagttctagctgggattcactcagtttgtgaagtgttaggttctctggagcccaggggatcactggagatatgtgtgcatatgtggtcattcccctggcctagacaagtcaggatcctgaaggtagtgcccctaatacctcctcccttcccatcatgatcccctacctcctcttttctgcccatgtacccttatgataaaagaacactactctgtagactccaatgtcccacagtatccctggtctcttgaccctttctttccaaattacccagattctgcagttttagcatctgtgtggcctgtctcctgggttcccgtgggtcctggagctgaacaacaaatgtttggtagaggtggatctcctttttttgcaactgacagccagaagtgatttcttcagagaatagatagtggctgcacttctggactttatcattatccgagttcttgtacctagaggagaaaggttggaaggaagaggaacagtggggccaatctgggtactgcagatatccagagcctagcctcatctcccctcaaccgacttatgacttaccccaggagaaaacagtggggtacctgggagacttgctaccctctctcttggtctctgatccaacccacctcttcttcatcccctccccctcgtcccttctcataccaataatgcagagtgaggttggtaggctggggctcagagctgctgttccaagtgcaattcatgtactcgacattgaacacaaaacactgaacctctgggaggggcagagtggaaacactgagggagtcagtgggcatagtggtcaggaagaaatctagattggggagaaaatgaaggcagggagggaaagagaaatgatggtcagaaggaggaggccaagcacggtggctcatgtctgtaatcctggtgctttgaaaggctgaggcaggaggatcactagaggccaggagtttgagaccagcctaggcaacatagtgagaccctgcctcaaaagaaagaaagaaacaaacaaacaagaaagaaagaaagaagaagtagcgtgaggcagggaaccctcccccttgcccttcccactccacttttcaattctgcccacatgattgtaatggccagtggcaggcaccagatctctgtacggccccttcccacagccacccttctcaccagccccctccagtcccagatttcccaccagctgtggtgtcttcattcccattgggcgtcagaattgtcgtgttcagccccactcccagcaggggcagctgcaggaataagagggatgtgaatggtaatgatggcttcaacatggcgcttgctcttcattccctgggtgtagtctgtctgtgtcaggaacctgggtccctcacccactacccctccccacccacacgtttcctctgtcatagcttccggtggaaagaaccttataaaccagggctttacagagggtgtggcaaatatgtgctgtgtgacacgggctaagtcctctaggagattaggtgctgctgtaaggtggtaaacagaaactaaagctggatatacaatagtgtcacagactcaaaaatcctcagcccacctagatcctgggaaggatctgttcactgcggccgcatgttctttttttttttttttttttttttctgagagatcccctcataatttccccaaatattcgtc

SEQ ID NO: 561 - DNA, 251 bp, unidentified
  source 1..251: mol_type = other DNA
cacgtgtttggggaaattatgaggggatctctcagtttctcgatcattattattttttggcgatcgcttttttttttttttttagcaaattggtaatactcctgcctccacagttttttttttttttttgcgatcgcctttttttttttttttttttttctgagagatcccctcataatttccccaaacacgtgttttttttttttttttttttcagctatatttggggaaattatgaggggatctctcag

SEQ ID NO: 562 - DNA, 248 bp, unidentified
  source 1..248: mol_type = other DNA
ctgagagatcccctcataatttccccaaaagtatgaatttttttttttttttttatcatctttggggaaattatgaggggatctctcagttttttttttttttttttttttggcgatcgcttttttttttttttttccttctcctctaaatcattaccttctataattttttttttttttttgcgatcgcctttttttttttttgatacatttctgagagatcccctcataatttccccaaagatgat

SEQ ID NO: 563 - DNA, 4714 bp, unidentified
  source 1..4714: mol_type = other DNA
ttcatacttttggggaaattatgaggggatctctcagttttttttttttttttttttttgaacatgcggccgcgtgaacagatccttcccaggatctaggtgggctgaggatttttgagtctgtgacactattgtatatccagctttagtttctgtttaccaccttacagcagcacctaatctcctagaggacttagcccgtgtcacacagcacatatttgccacaccctctgtaaagccctggtttataaggttctttccaccggaagctatgacagaggaaacgtgtgggtggggaggggtagtgggtgagggacccaggttcctgacacagacagactacacccagggaatgaagagcaagcgccatgttgaagccatcattaccattcacatccctcttattcctgcagctgcccctgctgggagtggggctgaacacgacaattctgacgcccaatgggaatgaagacaccacagctggtgggaaatctgggactggagggggctggtgagaagggtggctgtgggaaggggccgtacagagatctggtgcctgccactggccattacaatcatgtgggcagaattgaaaagtggagtgggaagggcaagggggagggttccctgcctcacgctacttcttctttctttctttcttgtttgtttgtttctttctttcttttgaggcagggtctcactatgttgcctaggctggtctcaaactcctggcctctagtgatcctcctgcctcagcctttcaaagcaccaggattacagacatgagccaccgtgcttggcctcctccttctgaccatcatttctctttccctccctgccttcattttctccccaatctagatttcttcctgaccactatgcccactgactccctcagtgtttccactctgcccctcccagaggttcagtgttttgtgttcaatgtcgagtacatgaattgcacttggaacagcagctctgagccccagcctaccaacctcactctgcattattggtatgagaagggacgagggggaggggatgaagaagaggtgggttggatcagagaccaagagagagggtagcaagtctcccaggtaccccactgttttctcctggggtaagtcataagtcggttgaggggagatgaggctaggctctggatatctgcagtacccagattggccccactgttcctcttccttccaacctttctcctctaggtacaagaactcggataatgataaagtccagaagtgcagccactatctattctctgaagaaatcacttctggctgtcagttgcaaaaaaaggagatccacctctaccaaacatttgttgttcagctccaggacccacgggaacccaggagacaggccacacagatgctaaaactgcagaatctgggtaatttggaaagaaagggtcaagagaccagggatactgtgggacattggagtctacagagtagtgttcttttatcataagggtacatgggcagaaaagaggaggtaggggatcatgatgggaagggaggaggtattaggggcactaccttcaggatcctgacttgtctaggccaggggaatgaccacatatgcacacatatctccagtgatcccctgggctccagagaacctaacacttcacaaactgagtgaatcccagctagaactgaactggaacaacagattcttgaaccactgtttggagcacttggtgcagtaccggactgactgggaccacagctggactgtgagtgactagggacgtgaatgtagcagctaaggccaagaaagtagggctaaaggattcaaccagacagatagaaggacctaatatcaagctcctgttctctgcctcccagcttctctgctcaccccctaccctccctcctccaactcctttcccccctattttctccagtgagttttctttttttcttttcttttctttctttctttcttttttttttttttttgagacagagcctcactctgttgcccaggcttgagtgcagtggggcgatcttgggctcactgcgacctctgtctccctggttcaagtgattctcctgcttcagcctcccaagtagctgggagcatgcacaaccatgcctggctaatttttgtatttttagtaaagacagggttttgccatgttggtcaggctggtcttgaactcctgacctcaggtgatctgcccacctcggcctcccaaagtgctgggattacaggcgtgagccaccattcctgacaccagtgagttttcattagggattccctacccatactcttcctgataccagatagacaagtaaacaaaaggaagccattaaggggatccagaggggaggcattagattcaagtcagtgaagggagcagtgtggcttgagtagtcaagagatgagagagaaactgggcagtagcagagatgacactggtgggtgttcaggagtatgttttaattctcccttctctcatagacacccactttccctcatcctctttctcctcaaggaacaatcagtggattatagacataagttctccttgcctagtgtggatgggcagaaacgctacacgtttcgtgttcggagccgctttaacccactctgtggaagtgctcagcattggagtgaatggagccacccaatccactgggggagcaatacttcaaaaggtaaaatgggcccacatgacccaatccatgagcccaacaccccagcctttctaacaccactgtcttttgctccacttccctgtcactaaagcccctaaacttggtgccccatctctccacactgtctaaccccaacctctagaaatcaaggtttttctgtgtagggttgggttagcgtgttgttagagtaggggagtggattgagaaggaggctgaggggtactcaagggggctatagaatgtataggatttccctgaagcattcctagagagcctgcaaggtgaagatggctttggaaccagctggatctaggctgtgccacatactacctctttggccttggccacatccctaaactcttggattctgtttcctaagatgtaagatggaggtaattgttcctgcctcacaggagctgttgtgaggattaaacagagagtatgtctttagcgcggtgcctggcaccagtgcctggcatgtagtaggggcacaacaaatataaggtccactttgcttttcttttttctatagagaatcctttcctgtttgcattggaagccgtggttatctctgttggctccatgggattgattatcagccttctctgtgtgtatttctggctggaacggtgagatttggagaagcccagaaaaatgaggggaacggtagctgacaatagcagaggagggttttgcagggtctttaggagtaaaggatgagacagtaagtaatgagagattacccaagagggtttggtgatggaaggaagccacaggcacagagaacacagaatcactttatttcatatgggacaactgggagaagggtgataaaaaagctttaacctatgtgctcctgctccctctttctcccctgtcaggacgatgccccgaattcccaccctgaagaacctagaggatcttgttactgaataccacgggaacttttcggtgagaacgctgtcataagcatgctgcagtctatcaactgccaactgcctgccagcaagacagacagagtgtgggggtgggggcagagaggagagggaaggaggccctgcactaactgtcaggatgtggccgaccaaatggggcatggactatacagagagagacacacacagaagtgcagattatagattgaatgaggcagatggcaactggtattgggggcccaggagcctgtgtatcccttctgtaatcaattacagtggttgcagacatcatgagtactcctttggcacagagctcggtcttttacttcctgcccctaattgacccctgacctggacatatctgtctttaggcctggagtggtgtgtctaagggactggctgagagtctgcagccagactacagtgaacgactctgcctcgtcagtgagattcccccaaaaggaggggcccttggggaggggcctggggcctccccatgcaaccagcatagcccctactgggcccccccatgttacaccctaaagcctgaaacctgaaccccaatcctctgacagaagaaccccagggtcctgtagccctaagtggtactaactttccttcattcaacccacctgcgtctcatactcacctcaccccactgtggctgatttggaattttgtgcccccatgtaagcaccccttcatttggcattccccacttgagaattacccttttgccccgaacatgtttttcttctccctcagtctggcccttccttttcgcaggattcttcctccctccctctttccctcccttcctctttccatctaccctccgattgttcctgaaccgatgagaaataaagtttctgttgataatcatcaaaaatgtctgtcatgggggtggggagcaggggaagcctgggatgcaatgagggtgggaggggaagaaaaaggagtagtacattcatgctgtggaggcatctaaaaaaataaaaaaaataaaaaaagcattattgactgatgcatgtaacctttttttttttttttttttttttctgagagatcccctcataatttccccaaatatagctg

SEQ ID NO: 564 - DNA, 248 bp, unidentified
  source 1..248: mol_type = other DNA
tttggggaaattatgaggggatctctcaggtagtgtatttttttttttttttttatcatcctgagagatcccctcataatttccccaaattttttttttttttttttttttggcgatcgcttttttttttttttttgctagaaagagtactgttctggaaactgacttttttttttttttttgcgatcgcctttttttttttttgatacattttttggggaaattatgaggggatctctcaggatgat

SEQ ID NO: 565 - DNA, 251 bp, unidentified
  source 1..251: mol_type = other DNA
cacgtgctgagagatcccctcataatttccccaaatttctcgatcattattattttttggcgatcgcttttttttttttttttgttgagaatggtgctagtggtagtgaacagttttttttttttttttgcgatcgccttttttttttttttttttttttttggggaaattatgaggggatctctcagcacgtgttttttttttttttttttttgacgaatactgagagatcccctcataatttccccaaa

SEQ ID NO: 566 - DNA, 4715 bp, unidentified
  source 1..4715: mol_type = other DNA
tacactacctgagagatcccctcataatttccccaaattttttttttttttttttttttggttacatgcatcagtcaataatgctttttttattttttttatttttttagatgcctccacagcatgaatgtactactcctttttcttcccctcccaccctcattgcatcccaggcttcccctgctccccacccccatgacagacatttttgatgattatcaacagaaactttatttctcatcggttcaggaacaatcggagggtagatggaaagaggaagggagggaaagagggagggaggaagaatcctgcgaaaaggaagggccagactgagggagaagaaaaacatgttcggggcaaaagggtaattctcaagtggggaatgccaaatgaaggggtgcttacatgggggcacaaaattccaaatcagccacagtggggtgaggtgagtatgagacgcaggtgggttgaatgaaggaaagttagtaccacttagggctacaggaccctggggttcttctgtcagaggattggggttcaggtttcaggctttagggtgtaacatgggggggcccagtaggggctatgctggttgcatggggaggccccaggcccctccccaagggcccctccttttgggggaatctcactgacgaggcagagtcgttcactgtagtctggctgcagactctcagccagtcccttagacacaccactccaggcctaaagacagatatgtccaggtcaggggtcaattaggggcaggaagtaaaagaccgagctctgtgccaaaggagtactcatgatgtctgcaaccactgtaattgattacagaagggatacacaggctcctgggcccccaataccagttgccatctgcctcattcaatctataatctgcacttctgtgtgtgtctctctctgtatagtccatgccccatttggtcggccacatcctgacagttagtgcagggcctccttccctctcctctctgcccccacccccacactctgtctgtcttgctggcaggcagttggcagttgatagactgcagcatgcttatgacagcgttctcaccgaaaagttcccgtggtattcagtaacaagatcctctaggttcttcagggtgggaattcggggcatcgtcctgacaggggagaaagagggagcaggagcacataggttaaagcttttttatcacccttctcccagttgtcccatatgaaataaagtgattctgtgttctctgtgcctgtggcttccttccatcaccaaaccctcttgggtaatctctcattacttactgtctcatcctttactcctaaagaccctgcaaaaccctcctctgctattgtcagctaccgttcccctcatttttctgggcttctccaaatctcaccgttccagccagaaatacacacagagaaggctgataatcaatcccatggagccaacagagataaccacggcttccaatgcaaacaggaaaggattctctatagaaaaaagaaaagcaaagtggaccttatatttgttgtgcccctactacatgccaggcactggtgccaggcaccgcgctaaagacatactctctgtttaatcctcacaacagctcctgtgaggcaggaacaattacctccatcttacatcttaggaaacagaatccaagagtttagggatgtggccaaggccaaagaggtagtatgtggcacagcctagatccagctggttccaaagccatcttcaccttgcaggctctctaggaatgcttcagggaaatcctatacattctatagcccccttgagtacccctcagcctccttctcaatccactcccctactctaacaacacgctaacccaaccctacacagaaaaaccttgatttctagaggttggggttagacagtgtggagagatggggcaccaagtttaggggctttagtgacagggaagtggagcaaaagacagtggtgttagaaaggctggggtgttgggctcatggattgggtcatgtgggcccattttaccttttgaagtattgctcccccagtggattgggtggctccattcactccaatgctgagcacttccacagagtgggttaaagcggctccgaacacgaaacgtgtagcgtttctgcccatccacactaggcaaggagaacttatgtctataatccactgattgttccttgaggagaaagaggatgagggaaagtgggtgtctatgagagaagggagaattaaaacatactcctgaacacccaccagtgtcatctctgctactgcccagtttctctctcatctcttgactactcaagccacactgctcccttcactgacttgaatctaatgcctcccctctggatccccttaatggcttccttttgtttacttgtctatctggtatcaggaagagtatgggtagggaatccctaatgaaaactcactggtgtcaggaatggtggctcacgcctgtaatcccagcactttgggaggccgaggtgggcagatcacctgaggtcaggagttcaagaccagcctgaccaacatggcaaaaccctgtctttactaaaaatacaaaaattagccaggcatggttgtgcatgctcccagctacttgggaggctgaagcaggagaatcacttgaaccagggagacagaggtcgcagtgagcccaagatcgccccactgcactcaagcctgggcaacagagtgaggctctgtctcaaaaaaaaaaaaaaaagaaagaaagaaagaaaagaaaagaaaaaaagaaaactcactggagaaaataggggggaaaggagttggaggagggagggtagggggtgagcagagaagctgggaggcagagaacaggagcttgatattaggtccttctatctgtctggttgaatcctttagccctactttcttggccttagctgctacattcacgtccctagtcactcacagtccagctgtggtcccagtcagtccggtactgcaccaagtgctccaaacagtggttcaagaatctgttgttccagttcagttctagctgggattcactcagtttgtgaagtgttaggttctctggagcccaggggatcactggagatatgtgtgcatatgtggtcattcccctggcctagacaagtcaggatcctgaaggtagtgcccctaatacctcctcccttcccatcatgatcccctacctcctcttttctgcccatgtacccttatgataaaagaacactactctgtagactccaatgtcccacagtatccctggtctcttgaccctttctttccaaattacccagattctgcagttttagcatctgtgtggcctgtctcctgggttcccgtgggtcctggagctgaacaacaaatgtttggtagaggtggatctcctttttttgcaactgacagccagaagtgatttcttcagagaatagatagtggctgcacttctggactttatcattatccgagttcttgtacctagaggagaaaggttggaaggaagaggaacagtggggccaatctgggtactgcagatatccagagcctagcctcatctcccctcaaccgacttatgacttaccccaggagaaaacagtggggtacctgggagacttgctaccctctctcttggtctctgatccaacccacctcttcttcatcccctccccctcgtcccttctcataccaataatgcagagtgaggttggtaggctggggctcagagctgctgttccaagtgcaattcatgtactcgacattgaacacaaaacactgaacctctgggaggggcagagtggaaacactgagggagtcagtgggcatagtggtcaggaagaaatctagattggggagaaaatgaaggcagggagggaaagagaaatgatggtcagaaggaggaggccaagcacggtggctcatgtctgtaatcctggtgctttgaaaggctgaggcaggaggatcactagaggccaggagtttgagaccagcctaggcaacatagtgagaccctgcctcaaaagaaagaaagaaacaaacaaacaagaaagaaagaaagaagaagtagcgtgaggcagggaaccctcccccttgcccttcccactccacttttcaattctgcccacatgattgtaatggccagtggcaggcaccagatctctgtacggccccttcccacagccacccttctcaccagccccctccagtcccagatttcccaccagctgtggtgtcttcattcccattgggcgtcagaattgtcgtgttcagccccactcccagcaggggcagctgcaggaataagagggatgtgaatggtaatgatggcttcaacatggcgcttgctcttcattccctgggtgtagtctgtctgtgtcaggaacctgggtccctcacccactacccctccccacccacacgtttcctctgtcatagcttccggtggaaagaaccttataaaccagggctttacagagggtgtggcaaatatgtgctgtgtgacacgggctaagtcctctaggagattaggtgctgctgtaaggtggtaaacagaaactaaagctggatatacaatagtgtcacagactcaaaaatcctcagcccacctagatcctgggaaggatctgttcactgcggccgcatgttcttttttttttttttttttttttttttggggaaattatgaggggatctctcagtattcgtc

SEQ ID NO: 567 - DNA, 251 bp, unidentified
  source 1..251: mol_type = other DNA
cacgtgctgagagatcccctcataatttccccaaatttctcgatcattattattttttggcgatcgcttttttttttttttttagcaaattggtaatactcctgcctccacagttttttttttttttttgcgatcgccttttttttttttttttttttttttggggaaattatgaggggatctctcagcacgtgttttttttttttttttttttcagctatactgagagatcccctcataatttccccaaa

SEQ ID NO: 568 - DNA, 248 bp, unidentified
  source 1..248: mol_type = other DNA
tttggggaaattatgaggggatctctcagagtatgaatttttttttttttttttatcatcctgagagatcccctcataatttccccaaattttttttttttttttttttttggcgatcgcttttttttttttttttccttctcctctaaatcattaccttctataattttttttttttttttgcgatcgcctttttttttttttgatacattttttggggaaattatgaggggatctctcaggatgat

SEQ ID NO: 569 - DNA, 4714 bp, unidentified
  source 1..4714: mol_type = other DNA
ttcatactctgagagatcccctcataatttccccaaattttttttttttttttttttttgaacatgcggccgcgtgaacagatccttcccaggatctaggtgggctgaggatttttgagtctgtgacactattgtatatccagctttagtttctgtttaccaccttacagcagcacctaatctcctagaggacttagcccgtgtcacacagcacatatttgccacaccctctgtaaagccctggtttataaggttctttccaccggaagctatgacagaggaaacgtgtgggtggggaggggtagtgggtgagggacccaggttcctgacacagacagactacacccagggaatgaagagcaagcgccatgttgaagccatcattaccattcacatccctcttattcctgcagctgcccctgctgggagtggggctgaacacgacaattctgacgcccaatgggaatgaagacaccacagctggtgggaaatctgggactggagggggctggtgagaagggtggctgtgggaaggggccgtacagagatctggtgcctgccactggccattacaatcatgtgggcagaattgaaaagtggagtgggaagggcaagggggagggttccctgcctcacgctacttcttctttctttctttcttgtttgtttgtttctttctttcttttgaggcagggtctcactatgttgcctaggctggtctcaaactcctggcctctagtgatcctcctgcctcagcctttcaaagcaccaggattacagacatgagccaccgtgcttggcctcctccttctgaccatcatttctctttccctccctgccttcattttctccccaatctagatttcttcctgaccactatgcccactgactccctcagtgtttccactctgcccctcccagaggttcagtgttttgtgttcaatgtcgagtacatgaattgcacttggaacagcagctctgagccccagcctaccaacctcactctgcattattggtatgagaagggacgagggggaggggatgaagaagaggtgggttggatcagagaccaagagagagggtagcaagtctcccaggtaccccactgttttctcctggggtaagtcataagtcggttgaggggagatgaggctaggctctggatatctgcagtacccagattggccccactgttcctcttccttccaacctttctcctctaggtacaagaactcggataatgataaagtccagaagtgcagccactatctattctctgaagaaatcacttctggctgtcagttgcaaaaaaaggagatccacctctaccaaacatttgttgttcagctccaggacccacgggaacccaggagacaggccacacagatgctaaaactgcagaatctgggtaatttggaaagaaagggtcaagagaccagggatactgtgggacattggagtctacagagtagtgttcttttatcataagggtacatgggcagaaaagaggaggtaggggatcatgatgggaagggaggaggtattaggggcactaccttcaggatcctgacttgtctaggccaggggaatgaccacatatgcacacatatctccagtgatcccctgggctccagagaacctaacacttcacaaactgagtgaatcccagctagaactgaactggaacaacagattcttgaaccactgtttggagcacttggtgcagtaccggactgactgggaccacagctggactgtgagtgactagggacgtgaatgtagcagctaaggccaagaaagtagggctaaaggattcaaccagacagatagaaggacctaatatcaagctcctgttctctgcctcccagcttctctgctcaccccctaccctccctcctccaactcctttcccccctattttctccagtgagttttctttttttcttttcttttctttctttctttcttttttttttttttttgagacagagcctcactctgttgcccaggcttgagtgcagtggggcgatcttgggctcactgcgacctctgtctccctggttcaagtgattctcctgcttcagcctcccaagtagctgggagcatgcacaaccatgcctggctaatttttgtatttttagtaaagacagggttttgccatgttggtcaggctggtcttgaactcctgacctcaggtgatctgcccacctcggcctcccaaagtgctgggattacaggcgtgagccaccattcctgacaccagtgagttttcattagggattccctacccatactcttcctgataccagatagacaagtaaacaaaaggaagccattaaggggatccagaggggaggcattagattcaagtcagtgaagggagcagtgtggcttgagtagtcaagagatgagagagaaactgggcagtagcagagatgacactggtgggtgttcaggagtatgttttaattctcccttctctcatagacacccactttccctcatcctctttctcctcaaggaacaatcagtggattatagacataagttctccttgcctagtgtggatgggcagaaacgctacacgtttcgtgttcggagccgctttaacccactctgtggaagtgctcagcattggagtgaatggagccacccaatccactgggggagcaatacttcaaaaggtaaaatgggcccacatgacccaatccatgagcccaacaccccagcctttctaacaccactgtcttttgctccacttccctgtcactaaagcccctaaacttggtgccccatctctccacactgtctaaccccaacctctagaaatcaaggtttttctgtgtagggttgggttagcgtgttgttagagtaggggagtggattgagaaggaggctgaggggtactcaagggggctatagaatgtataggatttccctgaagcattcctagagagcctgcaaggtgaagatggctttggaaccagctggatctaggctgtgccacatactacctctttggccttggccacatccctaaactcttggattctgtttcctaagatgtaagatggaggtaattgttcctgcctcacaggagctgttgtgaggattaaacagagagtatgtctttagcgcggtgcctggcaccagtgcctggcatgtagtaggggcacaacaaatataaggtccactttgcttttcttttttctatagagaatcctttcctgtttgcattggaagccgtggttatctctgttggctccatgggattgattatcagccttctctgtgtgtatttctggctggaacggtgagatttggagaagcccagaaaaatgaggggaacggtagctgacaatagcagaggagggttttgcagggtctttaggagtaaaggatgagacagtaagtaatgagagattacccaagagggtttggtgatggaaggaagccacaggcacagagaacacagaatcactttatttcatatgggacaactgggagaagggtgataaaaaagctttaacctatgtgctcctgctccctctttctcccctgtcaggacgatgccccgaattcccaccctgaagaacctagaggatcttgttactgaataccacgggaacttttcggtgagaacgctgtcataagcatgctgcagtctatcaactgccaactgcctgccagcaagacagacagagtgtgggggtgggggcagagaggagagggaaggaggccctgcactaactgtcaggatgtggccgaccaaatggggcatggactatacagagagagacacacacagaagtgcagattatagattgaatgaggcagatggcaactggtattgggggcccaggagcctgtgtatcccttctgtaatcaattacagtggttgcagacatcatgagtactcctttggcacagagctcggtcttttacttcctgcccctaattgacccctgacctggacatatctgtctttaggcctggagtggtgtgtctaagggactggctgagagtctgcagccagactacagtgaacgactctgcctcgtcagtgagattcccccaaaaggaggggcccttggggaggggcctggggcctccccatgcaaccagcatagcccctactgggcccccccatgttacaccctaaagcctgaaacctgaaccccaatcctctgacagaagaaccccagggtcctgtagccctaagtggtactaactttccttcattcaacccacctgcgtctcatactcacctcaccccactgtggctgatttggaattttgtgcccccatgtaagcaccccttcatttggcattccccacttgagaattacccttttgccccgaacatgtttttcttctccctcagtctggcccttccttttcgcaggattcttcctccctccctctttccctcccttcctctttccatctaccctccgattgttcctgaaccgatgagaaataaagtttctgttgataatcatcaaaaatgtctgtcatgggggtggggagcaggggaagcctgggatgcaatgagggtgggaggggaagaaaaaggagtagtacattcatgctgtggaggcatctaaaaaaataaaaaaaataaaaaaagcattattgactgatgcatgtaaccttttttttttttttttttttttttttggggaaattatgaggggatctctcagtatagctg

SEQ ID NO: 570 - DNA, 242 bp, unidentified
  source 1..242: mol_type = other DNA
ctgagagatcccctcataatttccccaaagtagtgtatttttttttttttttttatcatctttggggaaattatgaggggatctctcagttttttttttttttttttttttgcgaccttttttttttttttttgctagaaagagtactgttctggaaactgacttttttttttttttttggtcgctttttttttttttgatacatttctgagagatcccctcataatttccccaaagatgat

SEQ ID NO: 571 - DNA, 244 bp, unidentified
  source 1..244: mol_type = other DNA
cacgtgtttggggaaattatgaggggatctctcagtttctcgatcattattattttttgcgaccttttttttttttttttgttgagaatggtgctagtggtagtgaacagtttttttttttttttggtcgctttttttttttttttttttttctgagagatcccctcataatttccccaaacacgtgttttttttttttttttttttgacgaatatttggggaaattatgaggggatctctcag

SEQ ID NO: 572 - DNA, 4715 bp, unidentified; identical to SEQ ID NO: 560
  source 1..4715: mol_type = other DNA

SEQ ID NO: 573 - DNA, 245 bp, unidentified
  source 1..245: mol_type = other DNA
cacgtgtttggggaaattatgaggggatctctcagtttctcgatcattattattttttgcgaccttttttttttttttttagcaaattggtaatactcctgcctccacagttttttttttttttttggtcgctttttttttttttttttttttctgagagatcccctcataatttccccaaacacgtgttttttttttttttttttttcagctatatttggggaaattatgaggggatctctcag

SEQ ID NO: 574 - DNA, 242 bp, unidentified
  source 1..242: mol_type = other DNA
ctgagagatcccctcataatttccccaaaagtatgaatttttttttttttttttatcatctttggggaaattatgaggggatctctcagttttttttttttttttttttttgcgaccttttttttttttttttccttctcctctaaatcattaccttctataattttttttttttttttggtcgctttttttttttttgatacatttctgagagatcccctcataatttccccaaagatgat

SEQ ID NO: 575 - DNA, 4714 bp, unidentified; identical to SEQ ID NO: 563
  source 1..4714: mol_type = other DNA

SEQ ID NO: 576 - DNA, 242 bp, unidentified
  source 1..242: mol_type = other DNA
tttggggaaattatgaggggatctctcaggtagtgtatttttttttttttttttatcatcctgagagatcccctcataatttccccaaattttttttttttttttttttttgcgaccttttttttttttttttgctagaaagagtactgttctggaaactgacttttttttttttttttggtcgctttttttttttttgatacattttttggggaaattatgaggggatctctcaggatgat

SEQ ID NO: 577 - DNA, 245 bp, unidentified
  source 1..245: mol_type = other DNA
cacgtgctgagagatcccctcataatttccccaaatttctcgatcattattattttttgcgaccttttttttttttttttgttgagaatggtgctagtggtagtgaacagttttttttttttttttggtcgcttttttttttttttttttttttttggggaaattatgaggggatctctcagcacgtgttttttttttttttttttttgacgaatactgagagatcccctcataatttccccaaa

SEQ ID NO: 578 - DNA, 4715 bp, unidentified; identical to SEQ ID NO: 566
  source 1..4715: mol_type = other DNA

SEQ ID NO: 579 - DNA, 245 bp, unidentified
  source 1..245: mol_type = other DNA
cacgtgctgagagatcccctcataatttccccaaatttctcgatcattattattttttgcgaccttttttttttttttttagcaaattggtaatactcctgcctccacagttttttttttttttttggtcgcttttttttttttttttttttttttggggaaattatgaggggatctctcagcacgtgttttttttttttttttttttcagctatactgagagatcccctcataatttccccaaa

SEQ ID NO: 580 - DNA, 242 bp, unidentified
  source 1..242: mol_type = other DNA
tttggggaaattatgaggggatctctcagagtatgaatttttttttttttttttatcatcctgagagatcccctcataatttccccaaattttttttttttttttttttttgcgaccttttttttttttttttccttctcctctaaatcattaccttctataattttttttttttttttggtcgctttttttttttttgatacattttttggggaaattatgaggggatctctcaggatgat

SEQ ID NO: 581 - DNA, 4714 bp, unidentified; identical to SEQ ID NO: 569
  source 1..4714: mol_type = other DNA

SEQ ID NO: 582 - DNA, 254 bp, unidentified
  source 1..254: mol_type = other DNA
ctgagagatcccctcataatttccccaaagtagtgtatttttttttttttttttatcatctttggggaaattatgaggggatctctcagttttttttttttttttttttttgcggcgatcggcttttttttttttttttgctagaaagagtactgttctggaaactgacttttttttttttttttgccgatcgccgctttttttttttttgatacatttctgagagatcccctcataatttccccaaagatgat

SEQ ID NO: 583 - DNA, 257 bp, unidentified
  source 1..257: mol_type = other DNA
cacgtgtttggggaaattatgaggggatctctcagtttctcgatcattattattttttgcggcgatcggcttttttttttttttttgttgagaatggtgctagtggtagtgaacagttttttttttttttttgccgatcgccgctttttttttttttttttttttctgagagatcccctcataatttccccaaacacgtgttttttttttttttttttttgacgaatatttggggaaattatgaggggatctctcag

SEQ ID NO: 584 - DNA, 4715 bp, unidentified; identical to SEQ ID NO: 560
  source 1..4715: mol_type = other DNA

SEQ ID NO: 585 - DNA, 257 bp, unidentified
  source 1..257: mol_type = other DNA
cacgtgtttggggaaattatgaggggatctctcagtttctcgatcattattattttttgcggcgatcggcttttttttttttttttagcaaattggtaatactcctgcctccacagttttttttttttttttgccgatcgccgctttttttttttttttttttttctgagagatcccctcataatttccccaaacacgtgttttttttttttttttttttcagctatatttggggaaattatgaggggatctctcag

SEQ ID NO: 586 - DNA, 254 bp, unidentified
  source 1..254: mol_type = other DNA
ctgagagatcccctcataatttccccaaaagtatgaatttttttttttttttttatcatctttggggaaattatgaggggatctctcagttttttttttttttttttttttgcggcgatcggcttttttttttttttttccttctcctctaaatcattaccttctataattttttttttttttttgccgatcgccgctttttttttttttgatacatttctgagagatcccctcataatttccccaaagatgat

SEQ ID NO: 587 - DNA, 4714 bp, unidentified; identical to SEQ ID NO: 563
  source 1..4714: mol_type = other DNA

SEQ ID NO: 588 - DNA, 254 bp, unidentified
  source 1..254: mol_type = other DNA
tttggggaaattatgaggggatctctcaggtagtgtatttttttttttttttttatcatcctgagagatcccctcataatttccccaaattttttttttttttttttttttgcggcgatcggcttttttttttttttttgctagaaagagtactgttctggaaactgacttttttttttttttttgccgatcgccgctttttttttttttgatacattttttggggaaattatgaggggatctctcaggatgat

SEQ ID NO: 589 - DNA, 257 bp, unidentified
  source 1..257: mol_type = other DNA
cacgtgctgagagatcccctcataatttccccaaatttctcgatcattattattttttgcggcgatcggcttttttttttttttttgttgagaatggtgctagtggtagtgaacagttttttttttttttttgccgatcgccgcttttttttttttttttttttttttggggaaattatgaggggatctctcagcacgtgttttttttttttttttttttgacgaatactgagagatcccctcataatttccccaaa

SEQ ID NO: 590 - DNA, 4715 bp, unidentified; identical to SEQ ID NO: 566
  source 1..4715: mol_type = other DNA

SEQ ID NO: 591 - DNA, 257 bp, unidentified
  source 1..257: mol_type = other DNA
cacgtgctgagagatcccctcataatttccccaaatttctcgatcattattattttttgcggcgatcggcttttttttttttttttagcaaattggtaatactcctgcctccacagttttttttttttttttgccgatcgccgcttttttttttttttttttttttttggggaaattatgaggggatctctcagcacgtgttttttttttttttttttttcagctatactgagagatcccctcataatttccccaaa

SEQ ID NO: 592 - DNA, 254 bp, unidentified
  source 1..254: mol_type = other DNA
tttggggaaattatgaggggatctctcagagtatgaatttttttttttttttttatcatcctgagagatcccctcataatttccccaaattttttttttttttttttttttgcggcgatcggcttttttttttttttttccttctcctctaaatcattaccttctataattttttttttttttttgccgatcgccgctttttttttttttgatacattttttggggaaattatgaggggatctctcaggatgat

SEQ ID NO: 593 - DNA, 4714 bp, unidentified; identical to SEQ ID NO: 569
  source 1..4714: mol_type = other DNA

SEQ ID NO: 594 - DNA, 248 bp, unidentified
  source 1..248: mol_type = other DNA
ctgactcttatacacaagtagcgtcctgagtagtgtatttttttttttttttttatcatctcaggacgctacttgtgtataagagtcagttttttttttttttttttttttggcgatcgcttttttttttttttttgctagaaagagtactgttctggaaactgacttttttttttttttttgcgatcgcctttttttttttttgatacatttctgactcttatacacaagtagcgtcctgagatgat

SEQ ID NO: 595 - DNA, 251 bp, unidentified
  source 1..251: mol_type = other DNA
cacgtgtcaggacgctacttgtgtataagagtcagtttctcgatcattattattttttggcgatcgcttttttttttttttttgttgagaatggtgctagtggtagtgaacagttttttttttttttttgcgatcgcctttttttttttttttttttttctgactcttatacacaagtagcgtcctgacacgtgttttttttttttttttttttgacgaatatcaggacgctacttgtgtataagagtcag

SEQ ID NO: 596 - DNA, 4715 bp, unidentified
  source 1..4715: mol_type = other DNA
tacactactcaggacgctacttgtgtataagagtcagttttttttttttttttttttttggttacatgcatcagtcaataatgctttttttattttttttatttttttagatgcctccacagcatgaatgtactactcctttttcttcccctcccaccctcattgcatcccaggcttcccctgctccccacccccatgacagacatttttgatgattatcaacagaaactttatttctcatcggttcaggaacaatcggagggtagatggaaagaggaagggagggaaagagggagggaggaagaatcctgcgaaaaggaagggccagactgagggagaagaaaaacatgttcggggcaaaagggtaattctcaagtggggaatgccaaatgaaggggtgcttacatgggggcacaaaattccaaatcagccacagtggggtgaggtgagtatgagacgcaggtgggttgaatgaaggaaagttagtaccacttagggctacaggaccctggggttcttctgtcagaggattggggttcaggtttcaggctttagggtgtaacatgggggggcccagtaggggctatgctggttgcatggggaggccccaggcccctccccaagggcccctccttttgggggaatctcactgacgaggcagagtcgttcactgtagtctggctgcagactctcagccagtcccttagacacaccactccaggcctaaagacagatatgtccaggtcaggggtcaattaggggcaggaagtaaaagaccgagctctgtgccaaaggagtactcatgatgtctgcaaccactgtaattgattacagaagggatacacaggctcctgggcccccaataccagttgccatctgcctcattcaatctataatctgcacttctgtgtgtgtctctctctgtatagtccatgccccatttggtcggccacatcctgacagttagtgcagggcctccttccctctcctctctgcccccacccccacactctgtctgtcttgctggcaggcagttggcagttgatagactgcagcatgcttatgacagcgttctcaccgaaaagttcccgtggtattcagtaacaagatcctctaggttcttcagggtgggaattcggggcatcgtcctgacaggggagaaagagggagcaggagcacataggttaaagcttttttatcacccttctcccagttgtcccatatgaaataaagtgattctgtgttctctgtgcctgtggcttccttccatcaccaaaccctcttgggtaatctctcattacttactgtctcatcctttactcctaaagaccctgcaaaaccctcctctgctattgtcagctaccgttcccctcatttttctgggcttctccaaatctcaccgttccagccagaaatacacacagagaaggctgataatcaatcccatggagccaacagagataaccacggcttccaatgcaaacaggaaaggattctctatagaaaaaagaaaagcaaagtggaccttatatttgttgtgcccctactacatgccaggcactggtgccaggcaccgcgctaaagacatactctctgtttaatcctcacaacagctcctgtgaggcaggaacaattacctccatcttacatcttaggaaacagaatccaagagtttagggatgtggccaaggccaaagaggtagtatgtggcacagcctagatccagctggttccaaagccatcttcaccttgcaggctctctaggaatgcttcagggaaatcctatacattctatagcccccttgagtacccctcagcctccttctcaatccactcccctactctaacaacacgctaacccaaccctacacagaaaaaccttgatttctagaggttggggttagacagtgtggagagatggggcaccaagtttaggggctttagtgacagggaagtggagcaaaagacagtggtgttagaaaggctggggtgttgggctcatggattgggtcatgtgggcccattttaccttttgaagtattgctcccccagtggattgggtggctccattcactccaatgctgagcacttccacagagtgggttaaagcggctccgaacacgaaacgtgtagcgtttctgcccatccacactaggcaaggagaacttatgtctataatccactgattgttccttgaggagaaagaggatgagggaaagtgggtgtctatgagagaagggagaattaaaacatactcctgaacacccaccagtgtcatctctgctactgcccagtttctctctcatctcttgactactcaagccacactgctcccttcactgacttgaatctaatgcctcccctctggatccccttaatggcttccttttgtttacttgtctatctggtatcaggaagagtatgggtagggaatccctaatgaaaactcactggtgtcaggaatggtggctcacgcctgtaatcccagcactttgggaggccgaggtgggcagatcacctgaggtcaggagttcaagaccagcctgaccaacatggcaaaaccctgtctttactaaaaatacaaaaattagccaggcatggttgtgcatgctcccagctacttgggaggctgaagcaggagaatcacttgaaccagggagacagaggtcgcagtgagcccaagatcgccccactgcactcaagcctgggcaacagagtgaggctctgtctcaaaaaaaaaaaaaaaagaaagaaagaaagaaaagaaaagaaaaaaagaaaactcactggagaaaataggggggaaaggagttggaggagggagggtagggggtgagcagagaagctgggaggcagagaacaggagcttgatattaggtccttctatctgtctggttgaatcctttagccctactttcttggccttagctgctacattcacgtccctagtcactcacagtccagctgtggtcccagtcagtccggtactgcaccaagtgctccaaacagtggttcaagaatctgttgttccagttcagttctagctgggattcactcagtttgtgaagtgttaggttctctggagcccaggggatcactggagatatgtgtgcatatgtggtcattcccctggcctagacaagtcaggatcctgaaggtagtgcccctaatacctcctcccttcccatcatgatcccctacctcctcttttctgcccatgtacccttatgataaaagaacactactctgtagactccaatgtcccacagtatccctggtctcttgaccctttctttccaaattacccagattctgcagttttagcatctgtgtggcctgtctcctgggttcccgtgggtcctggagctgaacaacaaatgtttggtagaggtggatctcctttttttgcaactgacagccagaagtgatttcttcagagaatagatagtggctgcacttctggactttatcattatccgagttcttgtacctagaggagaaaggttggaaggaagaggaacagtggggccaatctgggtactgcagatatccagagcctagcctcatctcccctcaaccgacttatgacttaccccaggagaaaacagtggggtacctgggagacttgctaccctctctcttggtctctgatccaacccacctcttcttcatcccctccccctcgtcccttctcataccaataatgcagagtgaggttggtaggctggggctcagagctgctgttccaagtgcaattcatgtactcgacattgaacacaaaacactgaacctctgggaggggcagagtggaaacactgagggagtcagtgggcatagtggtcaggaagaaatctagattggggagaaaatgaaggcagggagggaaagagaaatgatggtcagaaggaggaggccaagcacggtggctcatgtctgtaatcctggtgctttgaaaggctgaggcaggaggatcactagaggccaggagtttgagaccagcctaggcaacatagtgagaccctgcctcaaaagaaagaaagaaacaaacaaacaagaaagaaagaaagaagaagtagcgtgaggcagggaaccctcccccttgcccttcccactccacttttcaattctgcccacatgattgtaatggccagtggcaggcaccagatctctgtacggccccttcccacagccacccttctcaccagccccctccagtcccagatttcccaccagctgtggtgtcttcattcccattgggcgtcagaattgtcgtgttcagccccactcccagcaggggcagctgcaggaataagagggatgtgaatggtaatgatggcttcaacatggcgcttgctcttcattccctgggtgtagtctgtctgtgtcaggaacctgggtccctcacccactacccctccccacccacacgtttcctctgtcatagcttccggtggaaagaaccttataaaccagggctttacagagggtgtggcaaatatgtgctgtgtgacacgggctaagtcctctaggagattaggtgctgctgtaaggtggtaaacagaaactaaagctggatatacaatagtgtcacagactcaaaaatcctcagcccacctagatcctgggaaggatctgttcactgcggccgcatgttctttttttttttttttttttttttctgactcttatacacaagtagcgtcctgatattcgtc

SEQ ID NO: 597 - DNA, 251 bp, unidentified
  source 1..251: mol_type = other DNA
cacgtgtcaggacgctacttgtgtataagagtcagtttctcgatcattattattttttggcgatcgcttttttttttttttttagcaaattggtaatactcctgcctccacagttttttttttttttttgcgatcgcctttttttttttttttttttttctgactcttatacacaagtagcgtcctgacacgtgttttttttttttttttttttcagctatatcaggacgctacttgtgtataagagtcag

SEQ ID NO: 598 - DNA, 248 bp, unidentified
  source 1..248: mol_type = other DNA
ctgactcttatacacaagtagcgtcctgaagtatgaatttttttttttttttttatcatctcaggacgctacttgtgtataagagtcagttttttttttttttttttttttggcgatcgcttttttttttttttttccttctcctctaaatcattaccttctataattttttttttttttttgcgatcgcctttttttttttttgatacatttctgactcttatacacaagtagcgtcctgagatgat

SEQ ID NO: 599 - DNA, 4714 bp, unidentified
  source 1..4714: mol_type = other DNA
ttcatacttcaggacgctacttgtgtataagagtcagttttttttttttttttttttttgaacatgcggccgcgtgaacagatccttcccaggatctaggtgggctgaggatttttgagtctgtgacactattgtatatccagctttagtttctgtttaccaccttacagcagcacctaatctcctagaggacttagcccgtgtcacacagcacatatttgccacaccctctgtaaagccctggtttataaggttctttccaccggaagctatgacagaggaaacgtgtgggtggggaggggtagtgggtgagggacccaggttcctgacacagacagactacacccagggaatgaagagcaagcgccatgttgaagccatcattaccattcacatccctcttattcctgcagctgcccctgctgggagtggggctgaacacgacaattctgacgcccaatgggaatgaagacaccacagctggtgggaaatctgggactggagggggctggtgagaagggtggctgtgggaaggggccgtacagagatctggtgcctgccactggccattacaatcatgtgggcagaattgaaaagtggagtgggaagggcaagggggagggttccctgcctcacgctacttcttctttctttctttcttgtttgtttgtttctttctttcttttgaggcagggtctcactatgttgcctaggctggtctcaaactcctggcctctagtgatcctcctgcctcagcctttcaaagcaccaggattacagacatgagccaccgtgcttggcctcctccttctgaccatcatttctctttccctccctgccttcattttctccccaatctagatttcttcctgaccactatgcccactgactccctcagtgtttccactctgcccctcccagaggttcagtgttttgtgttcaatgtcgagtacatgaattgcacttggaacagcagctctgagccccagcctaccaacctcactctgcattattggtatgagaagggacgagggggaggggatgaagaagaggtgggttggatcagagaccaagagagagggtagcaagtctcccaggtaccccactgttttctcctggggtaagtcataagtcggttgaggggagatgaggctaggctctggatatctgcagtacccagattggccccactgttcctcttccttccaacctttctcctctaggtacaagaactcggataatgataaagtccagaagtgcagccactatctattctctgaagaaatcacttctggctgtcagttgcaaaaaaaggagatccacctctaccaaacatttgttgttcagctccaggacccacgggaacccaggagacaggccacacagatgctaaaactgcagaatctgggtaatttggaaagaaagggtcaagagaccagggatactgtgggacattggagtctacagagtagtgttcttttatcataagggtacatgggcagaaaagaggaggtaggggatcatgatgggaagggaggaggtattaggggcactaccttcaggatcctgacttgtctaggccaggggaatgaccacatatgcacacatatctccagtgatcccctgggctccagagaacctaacacttcacaaactgagtgaatcccagctagaactgaactggaacaacagattcttgaaccactgtttggagcacttggtgcagtaccggactgactgggaccacagctggactgtgagtgactagggacgtgaatgtagcagctaaggccaagaaagtagggctaaaggattcaaccagacagatagaaggacctaatatcaagctcctgttctctgcctcccagcttctctgctcaccccctaccctccctcctccaactcctttcccccctattttctccagtgagttttctttttttcttttcttttctttctttctttcttttttttttttttttgagacagagcctcactctgttgcccaggcttgagtgcagtggggcgatcttgggctcactgcgacctctgtctccctggttcaagtgattctcctgcttcagcctcccaagtagctgggagcatgcacaaccatgcctggctaatttttgtatttttagtaaagacagggttttgccatgttggtcaggctggtcttgaactcctgacctcaggtgatctgcccacctcggcctcccaaagtgctgggattacaggcgtgagccaccattcctgacaccagtgagttttcattagggattccctacccatactcttcctgataccagatagacaagtaaacaaaaggaagccattaaggggatccagaggggaggcattagattcaagtcagtgaagggagcagtgtggcttgagtagtcaagagatgagagagaaactgggcagtagcagagatgacactggtgggtgttcaggagtatgttttaattctcccttctctcatagacacccactttccctcatcctctttctcctcaaggaacaatcagtggattatagacataagttctccttgcctagtgtggatgggcagaaacgctacacgtttcgtgttcggagccgctttaacccactctgtggaagtgctcagcattggagtgaatggagccacccaatccactgggggagcaatacttcaaaaggtaaaatgggcccacatgacccaatccatgagcccaacaccccagcctttctaacaccactgtcttttgctccacttccctgtcactaaagcccctaaacttggtgccccatctctccacactgtctaaccccaacctctagaaatcaaggtttttctgtgtagggttgggttagcgtgttgttagagtaggggagtggattgagaaggaggctgaggggtactcaagggggctatagaatgtataggatttccctgaagcattcctagagagcctgcaaggtgaagatggctttggaaccagctggatctaggctgtgccacatactacctctttggccttggccacatccctaaactcttggattctgtttcctaagatgtaagatggaggtaattgttcctgcctcacaggagctgttgtgaggattaaacagagagtatgtctttagcgcggtgcctggcaccagtgcctggcatgtagtaggggcacaacaaatataaggtccactttgcttttcttttttctatagagaatcctttcctgtttgcattggaagccgtggttatctctgttggctccatgggattgattatcagccttctctgtgtgtatttctggctggaacggtgagatttggagaagcccagaaaaatgaggggaacggtagctgacaatagcagaggagggttttgcagggtctttaggagtaaaggatgagacagtaagtaatgagagattacccaagagggtttggtgatggaaggaagccacaggcacagagaacacagaatcactttatttcatatgggacaactgggagaagggtgataaaaaagctttaacctatgtgctcctgctccctctttctcccctgtcaggacgatgccccgaattcccaccctgaagaacctagaggatcttgttactgaataccacgggaacttttcggtgagaacgctgtcataagcatgctgcagtctatcaactgccaactgcctgccagcaagacagacagagtgtgggggtgggggcagagaggagagggaaggaggccctgcactaactgtcaggatgtggccgaccaaatggggcatggactatacagagagagacacacacagaagtgcagattatagattgaatgaggcagatggcaactggtattgggggcccaggagcctgtgtatcccttctgtaatcaattacagtggttgcagacatcatgagtactcctttggcacagagctcggtcttttacttcctgcccctaattgacccctgacctggacatatctgtctttaggcctggagtggtgtgtctaagggactggctgagagtctgcagccagactacagtgaacgactctgcctcgtcagtgagattcccccaaaaggaggggcccttggggaggggcctggggcctccccatgcaaccagcatagcccctactgggcccccccatgttacaccctaaagcctgaaacctgaaccccaatcctctgacagaagaaccccagggtcctgtagccctaagtggtactaactttccttcattcaacccacctgcgtctcatactcacctcaccccactgtggctgatttggaattttgtgcccccatgtaagcaccccttcatttggcattccccacttgagaattacccttttgccccgaacatgtttttcttctccctcagtctggcccttccttttcgcaggattcttcctccctccctctttccctcccttcctctttccatctaccctccgattgttcctgaaccgatgagaaataaagtttctgttgataatcatcaaaaatgtctgtcatgggggtggggagcaggggaagcctgggatgcaatgagggtgggaggggaagaaaaaggagtagtacattcatgctgtggaggcatctaaaaaaataaaaaaaataaaaaaagcattattgactgatgcatgtaacctttttttttttttttttttttttctgactcttatacacaagtagcgtcctgatatagctg

SEQ ID NO: 600 - DNA, 248 bp, unidentified
  source 1..248: mol_type = other DNA
tcaggacgctacttgtgtataagagtcaggtagtgtatttttttttttttttttatcatcctgactcttatacacaagtagcgtcctgattttttttttttttttttttttggcgatcgcttttttttttttttttgctagaaagagtactgttctggaaactgacttttttttttttttttgcgatcgcctttttttttttttgatacattttcaggacgctacttgtgtataagagtcaggatgat

SEQ ID NO: 601 - DNA, 251 bp, unidentified
  source 1..251: mol_type = other DNA
cacgtgctgactcttatacacaagtagcgtcctgatttctcgatcattattattttttggcgatcgcttttttttttttttttgttgagaatggtgctagtggtagtgaacagttttttttttttttttgcgatcgccttttttttttttttttttttttcaggacgctacttgtgtataagagtcagcacgtgttttttttttttttttttttgacgaatactgactcttatacacaagtagcgtcctga

SEQ ID NO: 602 - DNA, 4715 bp, unidentified
  source 1..4715: mol_type = other DNA
tacactacctgactcttatacacaagtagcgtcctgattttttttttttttttttttttggttacatgcatcagtcaataatgctttttttattttttttatttttttagatgcctccacagcatgaatgtactactcctttttcttcccctcccaccctcattgcatcccaggcttcccctgctccccacccccatgacagacatttttgatgattatcaacagaaactttatttctcatcggttcaggaacaatcggagggtagatggaaagaggaagggagggaaagagggagggaggaagaatcctgcgaaaaggaagggccagactgagggagaagaaaaacatgttcggggcaaaagggtaattctcaagtggggaatgccaaatgaaggggtgcttacatgggggcacaaaattccaaatcagccacagtggggtgaggtgagtatgagacgcaggtgggttgaatgaaggaaagttagtaccacttagggctacaggaccctggggttcttctgtcagaggattggggttcaggtttcaggctttagggtgtaacatgggggggcccagtaggggctatgctggttgcatggggaggccccaggcccctccccaagggcccctccttttgggggaatctcactgacgaggcagagtcgttcactgtagtctggctgcagactctcagccagtcccttagacacaccactccaggcctaaagacagatatgtccaggtcaggggtcaattaggggcaggaagtaaaagaccgagctctgtgccaaaggagtactcatgatgtctgcaaccactgtaattgattacagaagggatacacaggctcctgggcccccaataccagttgccatctgcctcattcaatctataatctgcacttctgtgtgtgtctctctctgtatagtccatgccccatttggtcggccacatcctgacagttagtgcagggcctccttccctctcctctctgcccccacccccacactctgtctgtcttgctggcaggcagttggcagttgatagactgcagcatgcttatgacagcgttctcaccgaaaagttcccgtggtattcagtaacaagatcctctaggttcttcagggtgggaattcggggcatcgtcctgacaggggagaaagagggagcaggagcacataggttaaagcttttttatcacccttctcccagttgtcccatatgaaataaagtgattctgtgttctctgtgcctgtggcttccttccatcaccaaaccctcttgggtaatctctcattacttactgtctcatcctttactcctaaagaccctgcaaaaccctcctctgctattgtcagctaccgttcccctcatttttctgggcttctccaaatctcaccgttccagccagaaatacacacagagaaggctgataatcaatcccatggagccaacagagataaccacggcttccaatgcaaacaggaaaggattctctatagaaaaaagaaaagcaaagtggaccttatatttgttgtgcccctactacatgccaggcactggtgccaggcaccgcgctaaagacatactctctgtttaatcctcacaacagctcctgtgaggcaggaacaattacctccatcttacatcttaggaaacagaatccaagagtttagggatgtggccaaggccaaagaggtagtatgtggcacagcctagatccagctggttccaaagccatcttcaccttgcaggctctctaggaatgcttcagggaaatcctatacattctatagcccccttgagtacccctcagcctccttctcaatccactcccctactctaacaacacgctaacccaaccctacacagaaaaaccttgatttctagaggttggggttagacagtgtggagagatggggcaccaagtttaggggctttagtgacagggaagtggagcaaaagacagtggtgttagaaaggctggggtgttgggctcatggattgggtcatgtgggcccattttaccttttgaagtattgctcccccagtggattgggtggctccattcactccaatgctgagcacttccacagagtgggttaaagcggctccgaacacgaaacgtgtagcgtttctgcccatccacactaggcaaggagaacttatgtctataatccactgattgttccttgaggagaaagaggatgagggaaagtgggtgtctatgagagaagggagaattaaaacatactcctgaacacccaccagtgtcatctctgctactgcccagtttctctctcatctcttgactactcaagccacactgctcccttcactgacttgaatctaatgcctcccctctggatccccttaatggcttccttttgtttacttgtctatctggtatcaggaagagtatgggtagggaatccctaatgaaaactcactggtgtcaggaatggtggctcacgcctgtaatcccagcactttgggaggccgaggtgggcagatcacctgaggtcaggagttcaagaccagcctgaccaacatggcaaaaccctgtctttactaaaaatacaaaaattagccaggcatggttgtgcatgctcccagctacttgggaggctgaagcaggagaatcacttgaaccagggagacagaggtcgcagtgagcccaagatcgccccactgcactcaagcctgggcaacagagtgaggctctgtctcaaaaaaaaaaaaaaaagaaagaaagaaagaaaagaaaagaaaaaaagaaaactcactggagaaaataggggggaaaggagttggaggagggagggtagggggtgagcagagaagctgggaggcagagaacaggagcttgatattaggtccttctatctgtctggttgaatcctttagccctactttcttggccttagctgctacattcacgtccctagtcactcacagtccagctgtggtcccagtcagtccggtactgcaccaagtgctccaaacagtggttcaagaatctgttgttccagttcagttctagctgggattcactcagtttgtgaagtgttaggttctctggagcccaggggatcactggagatatgtgtgcatatgtggtcattcccctggcctagacaagtcaggatcctgaaggtagtgcccctaatacctcctcccttcccatcatgatcccctacctcctcttttctgcccatgtacccttatgataaaagaacactactctgtagactccaatgtcccacagtatccctggtctcttgaccctttctttccaaattacccagattctgcagttttagcatctgtgtggcctgtctcctgggttcccgtgggtcctggagctgaacaacaaatgtttggtagaggtggatctcctttttttgcaactgacagccagaagtgatttcttcagagaatagatagtggctgcacttctggactttatcattatccgagttcttgtacctagaggagaaaggttggaaggaagaggaacagtggggccaatctgggtactgcagatatccagagcctagcctcatctcccctcaaccgacttatgacttaccccaggagaaaacagtggggtacctgggagacttgctaccctctctcttggtctctgatccaacccacctcttcttcatcccctccccctcgtcccttctcataccaataatgcagagtgaggttggtaggctggggctcagagctgctgttccaagtgcaattcatgtactcgacattgaacacaaaacactgaacctctgggaggggcagagtggaaacactgagggagtcagtgggcatagtggtcaggaagaaatctagattggggagaaaatgaaggcagggagggaaagagaaatgatggtcagaaggaggaggccaagcacggtggctcatgtctgtaatcctggtgctttgaaaggctgaggcaggaggatcactagaggccaggagtttgagaccagcctaggcaacatagtgagaccctgcctcaaaagaaagaaagaaacaaacaaacaagaaagaaagaaagaagaagtagcgtgaggcagggaaccctcccccttgcccttcccactccacttttcaattctgcccacatgattgtaatggccagtggcaggcaccagatctctgtacggccccttcccacagccacccttctcaccagccccctccagtcccagatttcccaccagctgtggtgtcttcattcccattgggcgtcagaattgtcgtgttcagccccactcccagcaggggcagctgcaggaataagagggatgtgaatggtaatgatggcttcaacatggcgcttgctcttcattccctgggtgtagtctgtctgtgtcaggaacctgggtccctcacccactacccctccccacccacacgtttcctctgtcatagcttccggtggaaagaaccttataaaccagggctttacagagggtgtggcaaatatgtgctgtgtgacacgggctaagtcctctaggagattaggtgctgctgtaaggtggtaaacagaaactaaagctggatatacaatagtgtcacagactcaaaaatcctcagcccacctagatcctgggaaggatctgttcactgcggccgcatgttcttttttttttttttttttttttttcaggacgctacttgtgtataagagtcagtattcgtc

SEQ ID NO: 603 - DNA, 251 bp, unidentified
  source 1..251: mol_type = other DNA
cacgtgctgactcttatacacaagtagcgtcctgatttctcgatcattattattttttggcgatcgcttttttttttttttttagcaaattggtaatactcctgcctccacagttttttttttttttttgcgatcgccttttttttttttttttttttttcaggacgctacttgtgtataagagtcagcacgtgttttttttttttttttttttcagctatactgactcttatacacaagtagcgtcctga

SEQ ID NO: 604 - DNA, 248 bp, unidentified
  source 1..248: mol_type = other DNA
tcaggacgctacttgtgtataagagtcagagtatgaatttttttttttttttttatcatcctgactcttatacacaagtagcgtcctgattttttttttttttttttttttggcgatcgcttttttttttttttttccttctcctctaaatcattaccttctataattttttttttttttttgcgatcgcctttttttttttttgatacattttcaggacgctacttgtgtataagagtcaggatgat

SEQ ID NO: 605 - DNA, 4714 bp, unidentified
  source 1..4714: mol_type = other DNA
ttcatactctgactcttatacacaagtagcgtcctgattttttttttttttttttttttgaacatgcggccgcgtgaacagatccttcccaggatctaggtgggctgaggatttttgagtctgtgacactattgtatatccagctttagtttctgtttaccaccttacagcagcacctaatctcctagaggacttagcccgtgtcacacagcacatatttgccacaccctctgtaaagccctggtttataaggttctttccaccggaagctatgacagaggaaacgtgtgggtggggaggggtagtgggtgagggacccaggttcctgacacagacagactacacccagggaatgaagagcaagcgccatgttgaagccatcattaccattcacatccctcttattcctgcagctgcccctgctgggagtggggctgaacacgacaattctgacgcccaatgggaatgaagacaccacagctggtgggaaatctgggactggagggggctggtgagaagggtggctgtgggaaggggccgtacagagatctggtgcctgccactggccattacaatcatgtgggcagaattgaaaagtggagtgggaagggcaagggggagggttccctgcctcacgctacttcttctttctttctttcttgtttgtttgtttctttctttcttttgaggcagggtctcactatgttgcctaggctggtctcaaactcctggcctctagtgatcctcctgcctcagcctttcaaagcaccaggattacagacatgagccaccgtgcttggcctcctccttctgaccatcatttctctttccctccctgccttcattttctccccaatctagatttcttcctgaccactatgcccactgactccctcagtgtttccactctgcccctcccagaggttcagtgttttgtgttcaatgtcgagtacatgaattgcacttggaacagcagctctgagccccagcctaccaacctcactctgcattattggtatgagaagggacgagggggaggggatgaagaagaggtgggttggatcagagaccaagagagagggtagcaagtctcccaggtaccccactgttttctcctggggtaagtcataagtcggttgaggggagatgaggctaggctctggatatctgcagtacccagattggccccactgttcctcttccttccaacctttctcctctaggtacaagaactcggataatgataaagtccagaagtgcagccactatctattctctgaagaaatcacttctggctgtcagttgcaaaaaaaggagatccacctctaccaaacatttgttgttcagctccaggacccacgggaacccaggagacaggccacacagatgctaaaactgcagaatctgggtaatttggaaagaaagggtcaagagaccagggatactgtgggacattggagtctacagagtagtgttcttttatcataagggtacatgggcagaaaagaggaggtaggggatcatgatgggaagggaggaggtattaggggcactaccttcaggatcctgacttgtctaggccaggggaatgaccacatatgcacacatatctccagtgatcccctgggctccagagaacctaacacttcacaaactgagtgaatcccagctagaactgaactggaacaacagattcttgaaccactgtttggagcacttggtgcagtaccggactgactgggaccacagctggactgtgagtgactagggacgtgaatgtagcagctaaggccaagaaagtagggctaaaggattcaaccagacagatagaaggacctaatatcaagctcctgttctctgcctcccagcttctctgctcaccccctaccctccctcctccaactcctttcccccctattttctccagtgagttttctttttttcttttcttttctttctttctttcttttttttttttttttgagacagagcctcactctgttgcccaggcttgagtgcagtggggcgatcttgggctcactgcgacctctgtctccctggttcaagtgattctcctgcttcagcctcccaagtagctgggagcatgcacaaccatgcctggctaatttttgtatttttagtaaagacagggttttgccatgttggtcaggctggtcttgaactcctgacctcaggtgatctgcccacctcggcctcccaaagtgctgggattacaggcgtgagccaccattcctgacaccagtgagttttcattagggattccctacccatactcttcctgataccagatagacaagtaaacaaaaggaagccattaaggggatccagaggggaggcattagattcaagtcagtgaagggagcagtgtggcttgagtagtcaagagatgagagagaaactgggcagtagcagagatgacactggtgggtgttcaggagtatgttttaattctcccttctctcatagacacccactttccctcatcctctttctcctcaaggaacaatcagtggattatagacataagttctccttgcctagtgtggatgggcagaaacgctacacgtttcgtgttcggagccgctttaacccactctgtggaagtgctcagcattggagtgaatggagccacccaatccactgggggagcaatacttcaaaaggtaaaatgggcccacatgacccaatccatgagcccaacaccccagcctttctaacaccactgtcttttgctccacttccctgtcactaaagcccctaaacttggtgccccatctctccacactgtctaaccccaacctctagaaatcaaggtttttctgtgtagggttgggttagcgtgttgttagagtaggggagtggattgagaaggaggctgaggggtactcaagggggctatagaatgtataggatttccctgaagcattcctagagagcctgcaaggtgaagatggctttggaaccagctggatctaggctgtgccacatactacctctttggccttggccacatccctaaactcttggattctgtttcctaagatgtaagatggaggtaattgttcctgcctcacaggagctgttgtgaggattaaacagagagtatgtctttagcgcggtgcctggcaccagtgcctggcatgtagtaggggcacaacaaatataaggtccactttgcttttcttttttctatagagaatcctttcctgtttgcattggaagccgtggttatctctgttggctccatgggattgattatcagccttctctgtgtgtatttctggctggaacggtgagatttggagaagcccagaaaaatgaggggaacggtagctgacaatagcagaggagggttttgcagggtctttaggagtaaaggatgagacagtaagtaatgagagattacccaagagggtttggtgatggaaggaagccacaggcacagagaacacagaatcactttatttcatatgggacaactgggagaagggtgataaaaaagctttaacctatgtgctcctgctccctctttctcccctgtcaggacgatgccccgaattcccaccctgaagaacctagaggatcttgttactgaataccacgggaacttttcggtgagaacgctgtcataagcatgctgcagtctatcaactgccaactgcctgccagcaagacagacagagtgtgggggtgggggcagagaggagagggaaggaggccctgcactaactgtcaggatgtggccgaccaaatggggcatggactatacagagagagacacacacagaagtgcagattatagattgaatgaggcagatggcaactggtattgggggcccaggagcctgtgtatcccttctgtaatcaattacagtggttgcagacatcatgagtactcctttggcacagagctcggtcttttacttcctgcccctaattgacccctgacctggacatatctgtctttaggcctggagtggtgtgtctaagggactggctgagagtctgcagccagactacagtgaacgactctgcctcgtcagtgagattcccccaaaaggaggggcccttggggaggggcctggggcctccccatgcaaccagcatagcccctactgggcccccccatgttacaccctaaagcctgaaacctgaaccccaatcctctgacagaagaaccccagggtcctgtagccctaagtggtactaactttccttcattcaacccacctgcgtctcatactcacctcaccccactgtggctgatttggaattttgtgcccccatgtaagcaccccttcatttggcattccccacttgagaattacccttttgccccgaacatgtttttcttctccctcagtctggcccttccttttcgcaggattcttcctccctccctctttccctcccttcctctttccatctaccctccgattgttcctgaaccgatgagaaataaagtttctgttgataatcatcaaaaatgtctgtcatgggggtggggagcaggggaagcctgggatgcaatgagggtgggaggggaagaaaaaggagtagtacattcatgctgtggaggcatctaaaaaaataaaaaaaataaaaaaagcattattgactgatgcatgtaaccttttttttttttttttttttttttcaggacgctacttgtgtataagagtcagtatagctg

SEQ ID NO: 606 - DNA, 242 bp, unidentified
  source 1..242: mol_type = other DNA
ctgactcttatacacaagtagcgtcctgagtagtgtatttttttttttttttttatcatctcaggacgctacttgtgtataagagtcagttttttttttttttttttttttgcgaccttttttttttttttttgctagaaagagtactgttctggaaactgacttttttttttttttttggtcgctttttttttttttgatacatttctgactcttatacacaagtagcgtcctgagatgat

SEQ ID NO: 607 - DNA, 244 bp, unidentified
  source 1..244: mol_type = other DNA
cacgtgtcaggacgctacttgtgtataagagtcagtttctcgatcattattattttttgcgaccttttttttttttttttgttgagaatggtgctagtggtagtgaacagtttttttttttttttggtcgctttttttttttttttttttttctgactcttatacacaagtagcgtcctgacacgtgttttttttttttttttttttgacgaatatcaggacgctacttgtgtataagagtcag

SEQ ID NO: 608 - DNA, 4715 bp, unidentified; identical to SEQ ID NO: 596
  source 1..4715: mol_type = other DNA

SEQ ID NO: 609 - DNA, 245 bp, unidentified
  source 1..245: mol_type = other DNA
cacgtgtcaggacgctacttgtgtataagagtcagtttctcgatcattattattttttgcgaccttttttttttttttttagcaaattggtaatactcctgcctccacagttttttttttttttttggtcgctttttttttttttttttttttctgactcttatacacaagtagcgtcctgacacgtgttttttttttttttttttttcagctatatcaggacgctacttgtgtataagagtcag

SEQ ID NO: 610 - DNA, 242 bp, unidentified
  source 1..242: mol_type = other DNA
ctgactcttatacacaagtagcgtcctgaagtatgaatttttttttttttttttatcatctcaggacgctacttgtgtataagagtcagttttttttttttttttttttttgcgaccttttttttttttttttccttctcctctaaatcattaccttctataattttttttttttttttggtcgctttttttttttttgatacatttctgactcttatacacaagtagcgtcctgagatgat

SEQ ID NO: 611 - DNA, 4714 bp, unidentified; identical to SEQ ID NO: 599
  source 1..4714: mol_type = other DNA

SEQ ID NO: 612 - DNA, 242 bp, unidentified
  source 1..242: mol_type = other DNA
tcaggacgctacttgtgtataagagtcaggtagtgtatttttttttttttttttatcatcctgactcttatacacaagtagcgtcctgattttttttttttttttttttttgcgaccttttttttttttttttgctagaaagagtactgttctggaaactgacttttttttttttttttggtcgctttttttttttttgatacattttcaggacgctacttgtgtataagagtcaggatgat

SEQ ID NO: 613 - DNA, 245 bp, unidentified
  source 1..245: mol_type = other DNA
cacgtgctgactcttatacacaagtagcgtcctgatttctcgatcattattattttttgcgaccttttttttttttttttgttgagaatggtgctagtggtagtgaacagttttttttttttttttggtcgcttttttttttttttttttttttcaggacgctacttgtgtataagagtcagcacgtgttttttttttttttttttttgacgaatactgactcttatacacaagtagcgtcctga

SEQ ID NO: 614 - DNA, 4715 bp, unidentified; identical to SEQ ID NO: 602
  source 1..4715: mol_type = other DNA

SEQ ID NO: 615 - DNA, 245 bp, unidentified
  source 1..245: mol_type = other DNA
cacgtgctgactcttatacacaagtagcgtcctgatttctcgatcattattattttttgcgaccttttttttttttttttagcaaattggtaatactcctgcctccacagttttttttttttttttggtcgcttttttttttttttttttttttcaggacgctacttgtgtataagagtcagcacgtgttttttttttttttttttttcagctatactgactcttatacacaagtagcgtcctga

SEQ ID NO: 616 - DNA, 242 bp, unidentified
  source 1..242: mol_type = other DNA
tcaggacgctacttgtgtataagagtcagagtatgaatttttttttttttttttatcatcctgactcttatacacaagtagcgtcctgattttttttttttttttttttttgcgaccttttttttttttttttccttctcctctaaatcattaccttctataattttttttttttttttggtcgctttttttttttttgatacattttcaggacgctacttgtgtataagagtcaggatgat

SEQ ID NO: 617 - DNA, 4714 bp, unidentified; identical to SEQ ID NO: 605
  source 1..4714: mol_type = other DNA

SEQ ID NO: 618 - DNA, 254 bp, unidentified
  source 1..254: mol_type = other DNA
ctgactcttatacacaagtagcgtcctgagtagtgtatttttttttttttttttatcatctcaggacgctacttgtgtataagagtcagttttttttttttttttttttttgcggcgatcggcttttttttttttttttgctagaaagagtactgttctggaaactgacttttttttttttttttgccgatcgccgctttttttttttttgatacatttctgactcttatacacaagtagcgtcctgagatgat

SEQ ID NO: 619 - DNA, 257 bp, unidentified
  source 1..257: mol_type = other DNA
cacgtgtcaggacgctacttgtgtataagagtcagtttctcgatcattattattttttgcggcgatcggcttttttttttttttttgttgagaatggtgctagtggtagtgaacagttttttttttttttttgccgatcgccgctttttttttttttttttttttctgactcttatacacaagtagcgtcctgacacgtgttttttttttttttttttttgacgaatatcaggacgctacttgtgtataagagtcag

SEQ ID NO: 620 - DNA, 4715 bp, unidentified; identical to SEQ ID NO: 596
  source 1..4715: mol_type = other DNA

SEQ ID NO: 621 - DNA, 257 bp, unidentified
  source 1..257: mol_type = other DNA
cacgtgtcaggacgctacttgtgtataagagtcagtttctcgatcattattattttttgcggcgatcggcttttttttttttttttagcaaattggtaatactcctgcctccacagttttttttttttttttgccgatcgccgctttttttttttttttttttttctgactcttatacacaagtagcgtcctgacacgtgttttttttttttttttttttcagctatatcaggacgctacttgtgtataagagtcag

SEQ ID NO: 622 - DNA, 254 bp, unidentified
  source 1..254: mol_type = other DNA
ctgactcttatacacaagtagcgtcctgaagtatgaatttttttttttttttttatcatctcaggacgctacttgtgtataagagtcagttttttttttttttttttttttgcggcgatcggcttttttttttttttttccttctcctctaaatcattaccttctataattttttttttttttttgccgatcgccgctttttttttttttgatacatttctgactcttatacacaagtagcgtcctgagatgat

SEQ ID NO: 623 - DNA, 4714 bp, unidentified; identical to SEQ ID NO: 599
  source 1..4714: mol_type = other DNA

SEQ ID NO: 624 - DNA, 254 bp, unidentified
  source 1..254: mol_type = other DNA
tcaggacgctacttgtgtataagagtcaggtagtgtatttttttttttttttttatcatcctgactcttatacacaagtagcgtcctgattttttttttttttttttttttgcggcgatcggcttttttttttttttttgctagaaagagtactgttctggaaactgacttttttttttttttttgccgatcgccgctttttttttttttgatacattttcaggacgctacttgtgtataagagtcaggatgat

SEQ ID NO: 625 - DNA, 257 bp, unidentified
  source 1..257: mol_type = other DNA
cacgtgctgactcttatacacaagtagcgtcctgatttctcgatcattattattttttgcggcgatcggcttttttttttttttttgttgagaatggtgctagtggtagtgaacagttttttttttttttttgccgatcgccgcttttttttttttttttttttttcaggacgctacttgtgtataagagtcagcacgtgttttttttttttttttttttgacgaatactgactcttatacacaagtagcgtcctga

SEQ ID NO: 626 - DNA, 4715 bp, unidentified; identical to SEQ ID NO: 602
  source 1..4715: mol_type = other DNA

SEQ ID NO: 627 - DNA, 257 bp, unidentified
  source 1..257: mol_type = other DNA
cacgtgctgactcttatacacaagtagcgtcctgatttctcgatcattattattttttgcggcgatcggcttttttttttttttttagcaaattggtaatactcctgcctccacagttttttttttttttttgccgatcgccgcttttttttttttttttttttttcaggacgctacttgtgtataagagtcagcacgtgttttttttttttttttttttcagctatactgactcttatacacaagtagcgtcctga

SEQ ID NO: 628 - DNA, 254 bp, unidentified
  source 1..254: mol_type = other DNA
tcaggacgctacttgtgtataagagtcagagtatgaatttttttttttttttttatcatcctgactcttatacacaagtagcgtcctgattttttttttttttttttttttgcggcgatcggcttttttttttttttttccttctcctctaaatcattaccttctataattttttttttttttttgccgatcgccgctttttttttttttgatacattttcaggacgctacttgtgtataagagtcaggatgat

SEQ ID NO: 629 - DNA, 4714 bp, unidentified; identical to SEQ ID NO: 605
  source 1..4714: mol_type = other DNA

SEQ ID NO: 630 - DNA, 248 bp, unidentified
  source 1..248: mol_type = other DNA
ctgtctcttgatcagatcttgatcccctggtagtgtatttttttttttttttttatcatccaggggatcaagatctgatcaagagacagttttttttttttttttttttttggcgatcgcttttttttttttttttgctagaaagagtactgttctggaaactgacttttttttttttttttgcgatcgcctttttttttttttgatacatttctgtctcttgatcagatcttgatcccctggatgat

SEQ ID NO: 631 - DNA, 251 bp, unidentified
  source 1..251: mol_type = other DNA
cacgtgcaggggatcaagatctgatcaagagacagtttctcgatcattattattttttggcgatcgcttttttttttttttttgttgagaatggtgctagtggtagtgaacagttttttttttttttttgcgatcgcctttttttttttttttttttttctgtctcttgatcagatcttgatcccctgcacgtgttttttttttttttttttttgacgaatacaggggatcaagatctgatcaagagacag

SEQ ID NO: 632 - DNA, 4715 bp, unidentified
  source 1..4715: mol_type = other DNA
tacactaccaggggatcaagatctgatcaagagacagttttttttttttttttttttttggttacatgcatcagtcaataatgctttttttattttttttatttttttagatgcctccacagcatgaatgtactactcctttttcttcccctcccaccctcattgcatcccaggcttcccctgctccccacccccatgacagacatttttgatgattatcaacagaaactttatttctcatcggttcaggaacaatcggagggtagatggaaagaggaagggagggaaagagggagggaggaagaatcctgcgaaaaggaagggccagactgagggagaagaaaaacatgttcggggcaaaagggtaattctcaagtggggaatgccaaatgaaggggtgcttacatgggggcacaaaattccaaatcagccacagtggggtgaggtgagtatgagacgcaggtgggttgaatgaaggaaagttagtaccacttagggctacaggaccctggggttcttctgtcagaggattggggttcaggtttcaggctttagggtgtaacatgggggggcccagtaggggctatgctggttgcatggggaggccccaggcccctccccaagggcccctccttttgggggaatctcactgacgaggcagagtcgttcactgtagtctggctgcagactctcagccagtcccttagacacaccactccaggcctaaagacagatatgtccaggtcaggggtcaattaggggcaggaagtaaaagaccgagctctgtgccaaaggagtactcatgatgtctgcaaccactgtaattgattacagaagggatacacaggctcctgggcccccaataccagttgccatctgcctcattcaatctataatctgcacttctgtgtgtgtctctctctgtatagtccatgccccatttggtcggccacatcctgacagttagtgcagggcctccttccctctcctctctgcccccacccccacactctgtctgtcttgctggcaggcagttggcagttgatagactgcagcatgcttatgacagcgttctcaccgaaaagttcccgtggtattcagtaacaagatcctctaggttcttcagggtgggaattcggggcatcgtcctgacaggggagaaagagggagcaggagcacataggttaaagcttttttatcacccttctcccagttgtcccatatgaaataaagtgattctgtgttctctgtgcctgtggcttccttccatcaccaaaccctcttgggtaatctctcattacttactgtctcatcctttactcctaaagaccctgcaaaaccctcctctgctattgtcagctaccgttcccctcatttttctgggcttctccaaatctcaccgttccagccagaaatacacacagagaaggctgataatcaatcccatggagccaacagagataaccacggcttccaatgcaaacaggaaaggattctctatagaaaaaagaaaagcaaagtggaccttatatttgttgtgcccctactacatgccaggcactggtgccaggcaccgcgctaaagacatactctctgtttaatcctcacaacagctcctgtgaggcaggaacaattacctccatcttacatcttaggaaacagaatccaagagtttagggatgtggccaaggccaaagaggtagtatgtggcacagcctagatccagctggttccaaagccatcttcaccttgcaggctctctaggaatgcttcagggaaatcctatacattctatagcccccttgagtacccctcagcctccttctcaatccactcccctactctaacaacacgctaacccaaccctacacagaaaaaccttgatttctagaggttggggttagacagtgtggagagatggggcaccaagtttaggggctttagtgacagggaagtggagcaaaagacagtggtgttagaaaggctggggtgttgggctcatggattgggtcatgtgggcccattttaccttttgaagtattgctcccccagtggattgggtggctccattcactccaatgctgagcacttccacagagtgggttaaagcggctccgaacacgaaacgtgtagcgtttctgcccatccacactaggcaaggagaacttatgtctataatccactgattgttccttgaggagaaagaggatgagggaaagtgggtgtctatgagagaagggagaattaaaacatactcctgaacacccaccagtgtcatctctgctactgcccagtttctctctcatctcttgactactcaagccacactgctcccttcactgacttgaatctaatgcctcccctctggatccccttaatggcttccttttgtttacttgtctatctggtatcaggaagagtatgggtagggaatccctaatgaaaactcactggtgtcaggaatggtggctcacgcctgtaatcccagcactttgggaggccgaggtgggcagatcacctgaggtcaggagttcaagaccagcctgaccaacatggcaaaaccctgtctttactaaaaatacaaaaattagccaggcatggttgtgcatgctcccagctacttgggaggctgaagcaggagaatcacttgaaccagggagacagaggtcgcagtgagcccaagatcgccccactgcactcaagcctgggcaacagagtgaggctctgtctcaaaaaaaaaaaaaaaagaaagaaagaaagaaaagaaaagaaaaaaagaaaactcactggagaaaataggggggaaaggagttggaggagggagggtagggggtgagcagagaagctgggaggcagagaacaggagcttgatattaggtccttctatctgtctggttgaatcctttagccctactttcttggccttagctgctacattcacgtccctagtcactcacagtccagctgtggtcccagtcagtccggtactgcaccaagtgctccaaacagtggttcaagaatctgttgttccagttcagttctagctgggattcactcagtttgtgaagtgttaggttctctggagcccaggggatcactggagatatgtgtgcatatgtggtcattcccctggcctagacaagtcaggatcctgaaggtagtgcccctaatacctcctcccttcccatcatgatcccctacctcctcttttctgcccatgtacccttatgataaaagaacactactctgtagactccaatgtcccacagtatccctggtctcttgaccctttctttccaaattacccagattctgcagttttagcatctgtgtggcctgtctcctgggttcccgtgggtcctggagctgaacaacaaatgtttggtagaggtggatctcctttttttgcaactgacagccagaagtgatttcttcagagaatagatagtggctgcacttctggactttatcattatccgagttcttgtacctagaggagaaaggttggaaggaagaggaacagtggggccaatctgggtactgcagatatccagagcctagcctcatctcccctcaaccgacttatgacttaccccaggagaaaacagtggggtacctgggagacttgctaccctctctcttggtctctgatccaacccacctcttcttcatcccctccccctcgtcccttctcataccaataatgcagagtgaggttggtaggctggggctcagagctgctgttccaagtgcaattcatgtactcgacattgaacacaaaacactgaacctctgggaggggcagagtggaaacactgagggagtcagtgggcatagtggtcaggaagaaatctagattggggagaaaatgaaggcagggagggaaagagaaatgatggtcagaaggaggaggccaagcacggtggctcatgtctgtaatcctggtgctttgaaaggctgaggcaggaggatcactagaggccaggagtttgagaccagcctaggcaacatagtgagaccctgcctcaaaagaaagaaagaaacaaacaaacaagaaagaaagaaagaagaagtagcgtgaggcagggaaccctcccccttgcccttcccactccacttttcaattctgcccacatgattgtaatggccagtggcaggcaccagatctctgtacggccccttcccacagccacccttctcaccagccccctccagtcccagatttcccaccagctgtggtgtcttcattcccattgggcgtcagaattgtcgtgttcagccccactcccagcaggggcagctgcaggaataagagggatgtgaatggtaatgatggcttcaacatggcgcttgctcttcattccctgggtgtagtctgtctgtgtcaggaacctgggtccctcacccactacccctccccacccacacgtttcctctgtcatagcttccggtggaaagaaccttataaaccagggctttacagagggtgtggcaaatatgtgctgtgtgacacgggctaagtcctctaggagattaggtgctgctgtaaggtggtaaacagaaactaaagctggatatacaatagtgtcacagactcaaaaatcctcagcccacctagatcctgggaaggatctgttcactgcggccgcatgttctttttttttttttttttttttttctgtctcttgatcagatcttgatcccctgtattcgtc

SEQ ID NO: 633 - DNA, 251 bp, unidentified
  source 1..251: mol_type = other DNA
cacgtgcaggggatcaagatctgatcaagagacagtttctcgatcattattattttttggcgatcgcttttttttttttttttagcaaattggtaatactcctgcctccacagttttttttttttttttgcgatcgcctttttttttttttttttttttctgtctcttgatcagatcttgatcccctgcacgtgttttttttttttttttttttcagctatacaggggatcaagatctgatcaagagacag

SEQ ID NO: 634 - DNA, 248 bp, unidentified
  source 1..248: mol_type = other DNA
ctgtctcttgatcagatcttgatcccctgagtatgaatttttttttttttttttatcatccaggggatcaagatctgatcaagagacagttttttttttttttttttttttggcgatcgcttttttttttttttttccttctcctctaaatcattaccttctataattttttttttttttttgcgatcgcctttttttttttttgatacatttctgtctcttgatcagatcttgatcccctggatgat

SEQ ID NO: 635 - DNA, 4714 bp, unidentified
  source 1..4714: mol_type = other DNA
ttcatactcaggggatcaagatctgatcaagagacagttttttttttttttttttttttgaacatgcggccgcgtgaacagatccttcccaggatctaggtgggctgaggatttttgagtctgtgacactattgtatatccagctttagtttctgtttaccaccttacagcagcacctaatctcctagaggacttagcccgtgtcacacagcacatatttgccacaccctctgtaaagccctggtttataaggttctttccaccggaagctatgacagaggaaacgtgtgggtggggaggggtagtgggtgagggacccaggttcctgacacagacagactacacccagggaatgaagagcaagcgccatgttgaagccatcattaccattcacatccctcttattcctgcagctgcccctgctgggagtggggctgaacacgacaattctgacgcccaatgggaatgaagacaccacagctggtgggaaatctgggactggagggggctggtgagaagggtggctgtgggaaggggccgtacagagatctggtgcctgccactggccattacaatcatgtgggcagaattgaaaagtggagtgggaagggcaagggggagggttccctgcctcacgctacttcttctttctttctttcttgtttgtttgtttctttctttcttttgaggcagggtctcactatgttgcctaggctggtctcaaactcctggcctctagtgatcctcctgcctcagcctttcaaagcaccaggattacagacatgagccaccgtgcttggcctcctccttctgaccatcatttctctttccctccctgccttcattttctccccaatctagatttcttcctgaccactatgcccactgactccctcagtgtttccactctgcccctcccagaggttcagtgttttgtgttcaatgtcgagtacatgaattgcacttggaacagcagctctgagccccagcctaccaacctcactctgcattattggtatgagaagggacgagggggaggggatgaagaagaggtgggttggatcagagaccaagagagagggtagcaagtctcccaggtaccccactgttttctcctggggtaagtcataagtcggttgaggggagatgaggctaggctctggatatctgcagtacccagattggccccactgttcctcttccttccaacctttctcctctaggtacaagaactcggataatgataaagtccagaagtgcagccactatctattctctgaagaaatcacttctggctgtcagttgcaaaaaaaggagatccacctctaccaaacatttgttgttcagctccaggacccacgggaacccaggagacaggccacacagatgctaaaactgcagaatctgggtaatttggaaagaaagggtcaagagaccagggatactgtgggacattggagtctacagagtagtgttcttttatcataagggtacatgggcagaaaagaggaggtaggggatcatgatgggaagggaggaggtattaggggcactaccttcaggatcctgacttgtctaggccaggggaatgaccacatatgcacacatatctccagtgatcccctgggctccagagaacctaacacttcacaaactgagtgaatcccagctagaactgaactggaacaacagattcttgaaccactgtttggagcacttggtgcagtaccggactgactgggaccacagctggactgtgagtgactagggacgtgaatgtagcagctaaggccaagaaagtagggctaaaggattcaaccagacagatagaaggacctaatatcaagctcctgttctctgcctcccagcttctctgctcaccccctaccctccctcctccaactcctttcccccctattttctccagtgagttttctttttttcttttcttttctttctttctttcttttttttttttttttgagacagagcctcactctgttgcccaggcttgagtgcagtggggcgatcttgggctcactgcgacctctgtctccctggttcaagtgattctcctgcttcagcctcccaagtagctgggagcatgcacaaccatgcctggctaatttttgtatttttagtaaagacagggttttgccatgttggtcaggctggtcttgaactcctgacctcaggtgatctgcccacctcggcctcccaaagtgctgggattacaggcgtgagccaccattcctgacaccagtgagttttcattagggattccctacccatactcttcctgataccagatagacaagtaaacaaaaggaagccattaaggggatccagaggggaggcattagattcaagtcagtgaagggagcagtgtggcttgagtagtcaagagatgagagagaaactgggcagtagcagagatgacactggtgggtgttcaggagtatgttttaattctcccttctctcatagacacccactttccctcatcctctttctcctcaaggaacaatcagtggattatagacataagttctccttgcctagtgtggatgggcagaaacgctacacgtttcgtgttcggagccgctttaacccactctgtggaagtgctcagcattggagtgaatggagccacccaatccactgggggagcaatacttcaaaaggtaaaatgggcccacatgacccaatccatgagcccaacaccccagcctttctaacaccactgtcttttgctccacttccctgtcactaaagcccctaaacttggtgccccatctctccacactgtctaaccccaacctctagaaatcaaggtttttctgtgtagggttgggttagcgtgttgttagagtaggggagtggattgagaaggaggctgaggggtactcaagggggctatagaatgtataggatttccctgaagcattcctagagagcctgcaaggtgaagatggctttggaaccagctggatctaggctgtgccacatactacctctttggccttggccacatccctaaactcttggattctgtttcctaagatgtaagatggaggtaattgttcctgcctcacaggagctgttgtgaggattaaacagagagtatgtctttagcgcggtgcctggcaccagtgcctggcatgtagtaggggcacaacaaatataaggtccactttgcttttcttttttctatagagaatcctttcctgtttgcattggaagccgtggttatctctgttggctccatgggattgattatcagccttctctgtgtgtatttctggctggaacggtgagatttggagaagcccagaaaaatgaggggaacggtagctgacaatagcagaggagggttttgcagggtctttaggagtaaaggatgagacagtaagtaatgagagattacccaagagggtttggtgatggaaggaagccacaggcacagagaacacagaatcactttatttcatatgggacaactgggagaagggtgataaaaaagctttaacctatgtgctcctgctccctctttctcccctgtcaggacgatgccccgaattcccaccctgaagaacctagaggatcttgttactgaataccacgggaacttttcggtgagaacgctgtcataagcatgctgcagtctatcaactgccaactgcctgccagcaagacagacagagtgtgggggtgggggcagagaggagagggaaggaggccctgcactaactgtcaggatgtggccgaccaaatggggcatggactatacagagagagacacacacagaagtgcagattatagattgaatgaggcagatggcaactggtattgggggcccaggagcctgtgtatcccttctgtaatcaattacagtggttgcagacatcatgagtactcctttggcacagagctcggtcttttacttcctgcccctaattgacccctgacctggacatatctgtctttaggcctggagtggtgtgtctaagggactggctgagagtctgcagccagactacagtgaacgactctgcctcgtcagtgagattcccccaaaaggaggggcccttggggaggggcctggggcctccccatgcaaccagcatagcccctactgggcccccccatgttacaccctaaagcctgaaacctgaaccccaatcctctgacagaagaaccccagggtcctgtagccctaagtggtactaactttccttcattcaacccacctgcgtctcatactcacctcaccccactgtggctgatttggaattttgtgcccccatgtaagcaccccttcatttggcattccccacttgagaattacccttttgccccgaacatgtttttcttctccctcagtctggcccttccttttcgcaggattcttcctccctccctctttccctcccttcctctttccatctaccctccgattgttcctgaaccgatgagaaataaagtttctgttgataatcatcaaaaatgtctgtcatgggggtggggagcaggggaagcctgggatgcaatgagggtgggaggggaagaaaaaggagtagtacattcatgctgtggaggcatctaaaaaaataaaaaaaataaaaaaagcattattgactgatgcatgtaacctttttttttttttttttttttttctgtctcttgatcagatcttgatcccctgtatagctg

SEQ ID NO: 636 - DNA, 248 bp, unidentified
  source 1..248: mol_type = other DNA
caggggatcaagatctgatcaagagacaggtagtgtatttttttttttttttttatcatcctgtctcttgatcagatcttgatcccctgttttttttttttttttttttttggcgatcgcttttttttttttttttgctagaaagagtactgttctggaaactgacttttttttttttttttgcgatcgcctttttttttttttgatacatttcaggggatcaagatctgatcaagagacaggatgat

SEQ ID NO: 637 - DNA, 251 bp, unidentified
  source 1..251: mol_type = other DNA
cacgtgctgtctcttgatcagatcttgatcccctgtttctcgatcattattattttttggcgatcgcttttttttttttttttgttgagaatggtgctagtggtagtgaacagttttttttttttttttgcgatcgcctttttttttttttttttttttcaggggatcaagatctgatcaagagacagcacgtgttttttttttttttttttttgacgaatactgtctcttgatcagatcttgatcccctg

SEQ ID NO: 638 - DNA, 4715 bp, unidentified
  source 1..4715: mol_type = other DNA
tacactacctgtctcttgatcagatcttgatcccctgttttttttttttttttttttttggttacatgcatcagtcaataatgctttttttattttttttatttttttagatgcctccacagcatgaatgtactactcctttttcttcccctcccaccctcattgcatcccaggcttcccctgctccccacccccatgacagacatttttgatgattatcaacagaaactttatttctcatcggttcaggaacaatcggagggtagatggaaagaggaagggagggaaagagggagggaggaagaatcctgcgaaaaggaagggccagactgagggagaagaaaaacatgttcggggcaaaagggtaattctcaagtggggaatgccaaatgaaggggtgcttacatgggggcacaaaattccaaatcagccacagtggggtgaggtgagtatgagacgcaggtgggttgaatgaaggaaagttagtaccacttagggctacaggaccctggggttcttctgtcagaggattggggttcaggtttcaggctttagggtgtaacatgggggggcccagtaggggctatgctggttgcatggggaggccccaggcccctccccaagggcccctccttttgggggaatctcactgacgaggcagagtcgttcactgtagtctggctgcagactctcagccagtcccttagacacaccactccaggcctaaagacagatatgtccaggtcaggggtcaattaggggcaggaagtaaaagaccgagctctgtgccaaaggagtactcatgatgtctgcaaccactgtaattgattacagaagggatacacaggctcctgggcccccaataccagttgccatctgcctcattcaatctataatctgcacttctgtgtgtgtctctctctgtatagtccatgccccatttggtcggccacatcctgacagttagtgcagggcctccttccctctcctctctgcccccacccccacactctgtctgtcttgctggcaggcagttggcagttgatagactgcagcatgcttatgacagcgttctcaccgaaaagttcccgtggtattcagtaacaagatcctctaggttcttcagggtgggaattcggggcatcgtcctgacaggggagaaagagggagcaggagcacataggttaaagcttttttatcacccttctcccagttgtcccatatgaaataaagtgattctgtgttctctgtgcctgtggcttccttccatcaccaaaccctcttgggtaatctctcattacttactgtctcatcctttactcctaaagaccctgcaaaaccctcctctgctattgtcagctaccgttcccctcatttttctgggcttctccaaatctcaccgttccagccagaaatacacacagagaaggctgataatcaatcccatggagccaacagagataaccacggcttccaatgcaaacaggaaaggattctctatagaaaaaagaaaagcaaagtggaccttatatttgttgtgcccctactacatgccaggcactggtgccaggcaccgcgctaaagacatactctctgtttaatcctcacaacagctcctgtgaggcaggaacaattacctccatcttacatcttaggaaacagaatccaagagtttagggatgtggccaaggccaaagaggtagtatgtggcacagcctagatccagctggttccaaagccatcttcaccttgcaggctctctaggaatgcttcagggaaatcctatacattctatagcccccttgagtacccctcagcctccttctcaatccactcccctactctaacaacacgctaacccaaccctacacagaaaaaccttgatttctagaggttggggttagacagtgtggagagatggggcaccaagtttaggggctttagtgacagggaagtggagcaaaagacagtggtgttagaaaggctggggtgttgggctcatggattgggtcatgtgggcccattttaccttttgaagtattgctcccccagtggattgggtggctccattcactccaatgctgagcacttccacagagtgggttaaagcggctccgaacacgaaacgtgtagcgtttctgcccatccacactaggcaaggagaacttatgtctataatccactgattgttccttgaggagaaagaggatgagggaaagtgggtgtctatgagagaagggagaattaaaacatactcctgaacacccaccagtgtcatctctgctactgcccagtttctctctcatctcttgactactcaagccacactgctcccttcactgacttgaatctaatgcctcccctctggatccccttaatggcttccttttgtttacttgtctatctggtatcaggaagagtatgggtagggaatccctaatgaaaactcactggtgtcaggaatggtggctcacgcctgtaatcccagcactttgggaggccgaggtgggcagatcacctgaggtcaggagttcaagaccagcctgaccaacatggcaaaaccctgtctttactaaaaatacaaaaattagccaggcatggttgtgcatgctcccagctacttgggaggctgaagcaggagaatcacttgaaccagggagacagaggtcgcagtgagcccaagatcgccccactgcactcaagcctgggcaacagagtgaggctctgtctcaaaaaaaaaaaaaaaagaaagaaagaaagaaaagaaaagaaaaaaagaaaactcactggagaaaataggggggaaaggagttggaggagggagggtagggggtgagcagagaagctgggaggcagagaacaggagcttgatattaggtccttctatctgtctggttgaatcctttagccctactttcttggccttagctgctacattcacgtccctagtcactcacagtccagctgtggtcccagtcagtccggtactgcaccaagtgctccaaacagtggttcaagaatctgttgttccagttcagttctagctgggattcactcagtttgtgaagtgttaggttctctggagcccaggggatcactggagatatgtgtgcatatgtggtcattcccctggcctagacaagtcaggatcctgaaggtagtgcccctaatacctcctcccttcccatcatgatcccctacctcctcttttctgcccatgtacccttatgataaaagaacactactctgtagactccaatgtcccacagtatccctggtctcttgaccctttctttccaaattacccagattctgcagttttagcatctgtgtggcctgtctcctgggttcccgtgggtcctggagctgaacaacaaatgtttggtagaggtggatctcctttttttgcaactgacagccagaagtgatttcttcagagaatagatagtggctgcacttctggactttatcattatccgagttcttgtacctagaggagaaaggttggaaggaagaggaacagtggggccaatctgggtactgcagatatccagagcctagcctcatctcccctcaaccgacttatgacttaccccaggagaaaacagtggggtacctgggagacttgctaccctctctcttggtctctgatccaacccacctcttcttcatcccctccccctcgtcccttctcataccaataatgcagagtgaggttggtaggctggggctcagagctgctgttccaagtgcaattcatgtactcgacattgaacacaaaacactgaacctctgggaggggcagagtggaaacactgagggagtcagtgggcatagtggtcaggaagaaatctagattggggagaaaatgaaggcagggagggaaagagaaatgatggtcagaaggaggaggccaagcacggtggctcatgtctgtaatcctggtgctttgaaaggctgaggcaggaggatcactagaggccaggagtttgagaccagcctaggcaacatagtgagaccctgcctcaaaagaaagaaagaaacaaacaaacaagaaagaaagaaagaagaagtagcgtgaggcagggaaccctcccccttgcccttcccactccacttttcaattctgcccacatgattgtaatggccagtggcaggcaccagatctctgtacggccccttcccacagccacccttctcaccagccccctccagtcccagatttcccaccagctgtggtgtcttcattcccattgggcgtcagaattgtcgtgttcagccccactcccagcaggggcagctgcaggaataagagggatgtgaatggtaatgatggcttcaacatggcgcttgctcttcattccctgggtgtagtctgtctgtgtcaggaacctgggtccctcacccactacccctccccacccacacgtttcctctgtcatagcttccggtggaaagaaccttataaaccagggctttacagagggtgtggcaaatatgtgctgtgtgacacgggctaagtcctctaggagattaggtgctgctgtaaggtggtaaacagaaactaaagctggatatacaatagtgtcacagactcaaaaatcctcagcccacctagatcctgggaaggatctgttcactgcggccgcatgttctttttttttttttttttttttttcaggggatcaagatctgatcaagagacagtattcgtc

SEQ ID NO: 639 - DNA, 251 bp, unidentified
  source 1..251: mol_type = other DNA
cacgtgctgtctcttgatcagatcttgatcccctgtttctcgatcattattattttttggcgatcgcttttttttttttttttagcaaattggtaatactcctgcctccacagttttttttttttttttgcgatcgcctttttttttttttttttttttcaggggatcaagatctgatcaagagacagcacgtgttttttttttttttttttttcagctatactgtctcttgatcagatcttgatcccctg

SEQ ID NO: 640 - DNA, 248 bp, unidentified
  source 1..248: mol_type = other DNA
caggggatcaagatctgatcaagagacagagtatgaatttttttttttttttttatcatcctgtctcttgatcagatcttgatcccctgttttttttttttttttttttttggcgatcgcttttttttttttttttccttctcctctaaatcattaccttctataattttttttttttttttgcgatcgcctttttttttttttgatacatttcaggggatcaagatctgatcaagagacaggatgat

SEQ ID NO: 641 - DNA, 4714 bp, unidentified
  source 1..4714: mol_type = other DNA
ttcatactctgtctcttgatcagatcttgatcccctgttttttttttttttttttttttgaacatgcggccgcgtgaacagatccttcccaggatctaggtgggctgaggatttttgagtctgtgacactattgtatatccagctttagtttctgtttaccaccttacagcagcacctaatctcctagaggacttagcccgtgtcacacagcacatatttgccacaccctctgtaaagccctggtttataaggttctttccaccggaagctatgacagaggaaacgtgtgggtggggaggggtagtgggtgagggacccaggttcctgacacagacagactacacccagggaatgaagagcaagcgccatgttgaagccatcattaccattcacatccctcttattcctgcagctgcccctgctgggagtggggctgaacacgacaattctgacgcccaatgggaatgaagacaccacagctggtgggaaatctgggactggagggggctggtgagaagggtggctgtgggaaggggccgtacagagatctggtgcctgccactggccattacaatcatgtgggcagaattgaaaagtggagtgggaagggcaagggggagggttccctgcctcacgctacttcttctttctttctttcttgtttgtttgtttctttctttcttttgaggcagggtctcactatgttgcctaggctggtctcaaactcctggcctctagtgatcctcctgcctcagcctttcaaagcaccaggattacagacatgagccaccgtgcttggcctcctccttctgaccatcatttctctttccctccctgccttcattttctccccaatctagatttcttcctgaccactatgcccactgactccctcagtgtttccactctgcccctcccagaggttcagtgttttgtgttcaatgtcgagtacatgaattgcacttggaacagcagctctgagccccagcctaccaacctcactctgcattattggtatgagaagggacgagggggaggggatgaagaagaggtgggttggatcagagaccaagagagagggtagcaagtctcccaggtaccccactgttttctcctggggtaagtcataagtcggttgaggggagatgaggctaggctctggatatctgcagtacccagattggccccactgttcctcttccttccaacctttctcctctaggtacaagaactcggataatgataaagtccagaagtgcagccactatctattctctgaagaaatcacttctggctgtcagttgcaaaaaaaggagatccacctctaccaaacatttgttgttcagctccaggacccacgggaacccaggagacaggccacacagatgctaaaactgcagaatctgggtaatttggaaagaaagggtcaagagaccagggatactgtgggacattggagtctacagagtagtgttcttttatcataagggtacatgggcagaaaagaggaggtaggggatcatgatgggaagggaggaggtattaggggcactaccttcaggatcctgacttgtctaggccaggggaatgaccacatatgcacacatatctccagtgatcccctgggctccagagaacctaacacttcacaaactgagtgaatcccagctagaactgaactggaacaacagattcttgaaccactgtttggagcacttggtgcagtaccggactgactgggaccacagctggactgtgagtgactagggacgtgaatgtagcagctaaggccaagaaagtagggctaaaggattcaaccagacagatagaaggacctaatatcaagctcctgttctctgcctcccagcttctctgctcaccccctaccctccctcctccaactcctttcccccctattttctccagtgagttttctttttttcttttcttttctttctttctttcttttttttttttttttgagacagagcctcactctgttgcccaggcttgagtgcagtggggcgatcttgggctcactgcgacctctgtctccctggttcaagtgattctcctgcttcagcctcccaagtagctgggagcatgcacaaccatgcctggctaatttttgtatttttagtaaagacagggttttgccatgttggtcaggctggtcttgaactcctgacctcaggtgatctgcccacctcggcctcccaaagtgctgggattacaggcgtgagccaccattcctgacaccagtgagttttcattagggattccctacccatactcttcctgataccagatagacaagtaaacaaaaggaagccattaaggggatccagaggggaggcattagattcaagtcagtgaagggagcagtgtggcttgagtagtcaagagatgagagagaaactgggcagtagcagagatgacactggtgggtgttcaggagtatgttttaattctcccttctctcatagacacccactttccctcatcctctttctcctcaaggaacaatcagtggattatagacataagttctccttgcctagtgtggatgggcagaaacgctacacgtttcgtgttcggagccgctttaacccactctgtggaagtgctcagcattggagtgaatggagccacccaatccactgggggagcaatacttcaaaaggtaaaatgggcccacatgacccaatccatgagcccaacaccccagcctttctaacaccactgtcttttgctccacttccctgtcactaaagcccctaaacttggtgccccatctctccacactgtctaaccccaacctctagaaatcaaggtttttctgtgtagggttgggttagcgtgttgttagagtaggggagtggattgagaaggaggctgaggggtactcaagggggctatagaatgtataggatttccctgaagcattcctagagagcctgcaaggtgaagatggctttggaaccagctggatctaggctgtgccacatactacctctttggccttggccacatccctaaactcttggattctgtttcctaagatgtaagatggaggtaattgttcctgcctcacaggagctgttgtgaggattaaacagagagtatgtctttagcgcggtgcctggcaccagtgcctggcatgtagtaggggcacaacaaatataaggtccactttgcttttcttttttctatagagaatcctttcctgtttgcattggaagccgtggttatctctgttggctccatgggattgattatcagccttctctgtgtgtatttctggctggaacggtgagatttggagaagcccagaaaaatgaggggaacggtagctgacaatagcagaggagggttttgcagggtctttaggagtaaaggatgagacagtaagtaatgagagattacccaagagggtttggtgatggaaggaagccacaggcacagagaacacagaatcactttatttcatatgggacaactgggagaagggtgataaaaaagctttaacctatgtgctcctgctccctctttctcccctgtcaggacgatgccccgaattcccaccctgaagaacctagaggatcttgttactgaataccacgggaacttttcggtgagaacgctgtcataagcatgctgcagtctatcaactgccaactgcctgccagcaagacagacagagtgtgggggtgggggcagagaggagagggaaggaggccctgcactaactgtcaggatgtggccgaccaaatggggcatggactatacagagagagacacacacagaagtgcagattatagattgaatgaggcagatggcaactggtattgggggcccaggagcctgtgtatcccttctgtaatcaattacagtggttgcagacatcatgagtactcctttggcacagagctcggtcttttacttcctgcccctaattgacccctgacctggacatatctgtctttaggcctggagtggtgtgtctaagggactggctgagagtctgcagccagactacagtgaacgactctgcctcgtcagtgagattcccccaaaaggaggggcccttggggaggggcctggggcctccccatgcaaccagcatagcccctactgggcccccccatgttacaccctaaagcctgaaacctgaaccccaatcctctgacagaagaaccccagggtcctgtagccctaagtggtactaactttccttcattcaacccacctgcgtctcatactcacctcaccccactgtggctgatttggaattttgtgcccccatgtaagcaccccttcatttggcattccccacttgagaattacccttttgccccgaacatgtttttcttctccctcagtctggcccttccttttcgcaggattcttcctccctccctctttccctcccttcctctttccatctaccctccgattgttcctgaaccgatgagaaataaagtttctgttgataatcatcaaaaatgtctgtcatgggggtggggagcaggggaagcctgggatgcaatgagggtgggaggggaagaaaaaggagtagtacattcatgctgtggaggcatctaaaaaaataaaaaaaataaaaaaagcattattgactgatgcatgtaacctttttttttttttttttttttttcaggggatcaagatctgatcaagagacagtatagctg

SEQ ID NO: 642 - DNA, 242 bp, unidentified
  source 1..242: mol_type = other DNA
ctgtctcttgatcagatcttgatcccctggtagtgtatttttttttttttttttatcatccaggggatcaagatctgatcaagagacagttttttttttttttttttttttgcgaccttttttttttttttttgctagaaagagtactgttctggaaactgacttttttttttttttttggtcgctttttttttttttgatacatttctgtctcttgatcagatcttgatcccctggatgat

SEQ ID NO: 643 - DNA, 244 bp, unidentified
  source 1..244: mol_type = other DNA
cacgtgcaggggatcaagatctgatcaagagacagtttctcgatcattattattttttgcgaccttttttttttttttttgttgagaatggtgctagtggtagtgaacagtttttttttttttttggtcgctttttttttttttttttttttctgtctcttgatcagatcttgatcccctgcacgtgttttttttttttttttttttgacgaatacaggggatcaagatctgatcaagagacag

SEQ ID NO: 644 - DNA, 4715 bp, unidentified; identical to SEQ ID NO: 632
  source 1..4715: mol_type = other DNA

SEQ ID NO: 645 - DNA, 245 bp, unidentified
  source 1..245: mol_type = other DNA
cacgtgcaggggatcaagatctgatcaagagacagtttctcgatcattattattttttgcgaccttttttttttttttttagcaaattggtaatactcctgcctccacagttttttttttttttttggtcgctttttttttttttttttttttctgtctcttgatcagatcttgatcccctgcacgtgttttttttttttttttttttcagctatacaggggatcaagatctgatcaagagacag

SEQ ID NO: 646 - DNA, 242 bp, unidentified
  source 1..242: mol_type = other DNA
ctgtctcttgatcagatcttgatcccctgagtatgaatttttttttttttttttatcatccaggggatcaagatctgatcaagagacagttttttttttttttttttttttgcgaccttttttttttttttttccttctcctctaaatcattaccttctataattttttttttttttttggtcgctttttttttttttgatacatttctgtctcttgatcagatcttgatcccctggatgat

SEQ ID NO: 647 - DNA, 4714 bp, unidentified; identical to SEQ ID NO: 635
  source 1..4714: mol_type = other DNA

SEQ ID NO: 648 - DNA, 242 bp, unidentified
  source 1..242: mol_type = other DNA
caggggatcaagatctgatcaagagacaggtagtgtatttttttttttttttttatcatcctgtctcttgatcagatcttgatcccctgttttttttttttttttttttttgcgaccttttttttttttttttgctagaaagagtactgttctggaaactgacttttttttttttttttggtcgctttttttttttttgatacatttcaggggatcaagatctgatcaagagacaggatgat

SEQ ID NO: 649 - DNA, 245 bp, unidentified
  source 1..245: mol_type = other DNA
cacgtgctgtctcttgatcagatcttgatcccctgtttctcgatcattattattttttgcgaccttttttttttttttttgttgagaatggtgctagtggtagtgaacagttttttttttttttttggtcgctttttttttttttttttttttcaggggatcaagatctgatcaagagacagcacgtgttttttttttttttttttttgacgaatactgtctcttgatcagatcttgatcccctg

SEQ ID NO: 650 - DNA, 4715 bp, unidentified; identical to SEQ ID NO: 638
  source 1..4715: mol_type = other DNA

SEQ ID NO: 651 - DNA, 245 bp, unidentified
  source 1..245: mol_type = other DNA
cacgtgctgtctcttgatcagatcttgatcccctgtttctcgatcattattattttttgcgaccttttttttttttttttagcaaattggtaatactcctgcctccacagttttttttttttttttggtcgctttttttttttttttttttttcaggggatcaagatctgatcaagagacagcacgtgttttttttttttttttttttcagctatactgtctcttgatcagatcttgatcccctg

SEQ ID NO: 652 - DNA, 242 bp, unidentified
  source 1..242: mol_type = other DNA
caggggatcaagatctgatcaagagacagagtatgaatttttttttttttttttatcatcctgtctcttgatcagatcttgatcccctgttttttttttttttttttttttgcgaccttttttttttttttttccttctcctctaaatcattaccttctataattttttttttttttttggtcgctttttttttttttgatacatttcaggggatcaagatctgatcaagagacaggatgat

SEQ ID NO: 653 - DNA, 4714 bp, unidentified; identical to SEQ ID NO: 641
  source 1..4714: mol_type = other DNA

SEQ ID NO: 654 - DNA, 254 bp, unidentified
  source 1..254: mol_type = other DNA
ctgtctcttgatcagatcttgatcccctggtagtgtatttttttttttttttttatcatccaggggatcaagatctgatcaagagacagttttttttttttttttttttttgcggcgatcggcttttttttttttttttgctagaaagagtactgttctggaaactgacttttttttttttttttgccgatcgccgctttttttttttttgatacatttctgtctcttgatcagatcttgatcccctggatgat

SEQ ID NO: 655 - DNA, 257 bp, unidentified
  source 1..257: mol_type = other DNA
cacgtgcaggggatcaagatctgatcaagagacagtttctcgatcattattattttttgcggcgatcggcttttttttttttttttgttgagaatggtgctagtggtagtgaacagttttttttttttttttgccgatcgccgctttttttttttttttttttttctgtctcttgatcagatcttgatcccctgcacgtgttttttttttttttttttttgacgaatacaggggatcaagatctgatcaagagacag

SEQ ID NO: 656 - DNA, 4715 bp, unidentified; identical to SEQ ID NO: 632
  source 1..4715: mol_type = other DNA

SEQ ID NO: 657 - DNA, 257 bp, unidentified
  source 1..257: mol_type = other DNA
cacgtgcaggggatcaagatctgatcaagagacagtttctcgatcattattattttttgcggcgatcggcttttttttttttttttagcaaattggtaatactcctgcctccacagttttttttttttttttgccgatcgccgctttttttttttttttttttttctgtctcttgatcagatcttgatcccctgcacgtgttttttttttttttttttttcagctatacaggggatcaagatctgatcaagagacag

SEQ ID NO: 658 - DNA, 254 bp, unidentified
  source 1..254: mol_type = other DNA
ctgtctcttgatcagatcttgatcccctgagtatgaatttttttttttttttttatcatccaggggatcaagatctgatcaagagacagttttttttttttttttttttttgcggcgatcggcttttttttttttttttccttctcctctaaatcattaccttctataattttttttttttttttgccgatcgccgctttttttttttttgatacatttctgtctcttgatcagatcttgatcccctggatgat

SEQ ID NO: 659 - DNA, 4714 bp, unidentified; identical to SEQ ID NO: 635
  source 1..4714: mol_type = other DNA

SEQ ID NO: 660 - DNA, 254 bp, unidentified
  source 1..254: mol_type = other DNA
caggggatcaagatctgatcaagagacaggtagtgtatttttttttttttttttatcatcctgtctcttgatcagatcttgatcccctgttttttttttttttttttttttgcggcgatcggcttttttttttttttttgctagaaagagtactgttctggaaactgacttttttttttttttttgccgatcgccgctttttttttttttgatacatttcaggggatcaagatctgatcaagagacaggatgat

SEQ ID NO: 661 - DNA, 257 bp, unidentified
  source 1..257: mol_type = other DNA
cacgtgctgtctcttgatcagatcttgatcccctgtttctcgatcattattattttttgcggcgatcggcttttttttttttttttgttgagaatggtgctagtggtagtgaacagttttttttttttttttgccgatcgccgctttttttttttttttttttttcaggggatcaagatctgatcaagagacagcacgtgttttttttttttttttttttgacgaatactgtctcttgatcagatcttgatcccctg

SEQ ID NO: 662 - DNA, 4715 bp, unidentified; identical to SEQ ID NO: 638
  source 1..4715: mol_type = other DNA

SEQ ID NO: 663 - DNA, 257 bp, unidentified
  source 1..257: mol_type = other DNA
cacgtgctgtctcttgatcagatcttgatcccctgtttctcgatcattattattttttgcggcgatcggcttttttttttttttttagcaaattggtaatactcctgcctccacagttttttttttttttttgccgatcgccgctttttttttttttttttttttcaggggatcaagatctgatcaagagacagcacgtgttttttttttttttttttttcagctatactgtctcttgatcagatcttgatcccctg

SEQ ID NO: 664 - DNA, 254 bp, unidentified
  source 1..254: mol_type = other DNA
caggggatcaagatctgatcaagagacagagtatgaatttttttttttttttttatcatcctgtctcttgatcagatcttgatcccctgttttttttttttttttttttttgcggcgatcggcttttttttttttttttccttctcctctaaatcattaccttctataattttttttttttttttgccgatcgccgctttttttttttttgatacatttcaggggatcaagatctgatcaagagacaggatgat

SEQ ID NO: 665 - DNA, 4714 bp, unidentified; identical to SEQ ID NO: 641
  source 1..4714: mol_type = other DNA

SEQ ID NO: 666 - DNA, 248 bp, unidentified
  source 1..248: mol_type = other DNA
taatgccgatcagttaaggatcagttcacgtagtgtatttttttttttttttttatcatcgtgaactgatccttaactgatcggcattattttttttttttttttttttttggcgatcgcttttttttttttttttgctagaaagagtactgttctggaaactgacttttttttttttttttgcgatcgcctttttttttttttgatacattttaatgccgatcagttaaggatcagttcacgatgat

SEQ ID NO: 667 - DNA, 251 bp, unidentified
  source 1..251: mol_type = other DNA
cacgtggtgaactgatccttaactgatcggcattatttctcgatcattattattttttggcgatcgcttttttttttttttttgttgagaatggtgctagtggtagtgaacagttttttttttttttttgcgatcgccttttttttttttttttttttttaatgccgatcagttaaggatcagttcaccacgtgttttttttttttttttttttgacgaatagtgaactgatccttaactgatcggcatta

SEQ ID NO: 668 - DNA, 4715 bp, unidentified
  source 1..4715: mol_type = other DNA
tacactacgtgaactgatccttaactgatcggcattattttttttttttttttttttttggttacatgcatcagtcaataatgctttttttattttttttatttttttagatgcctccacagcatgaatgtactactcctttttcttcccctcccaccctcattgcatcccaggcttcccctgctccccacccccatgacagacatttttgatgattatcaacagaaactttatttctcatcggttcaggaacaatcggagggtagatggaaagaggaagggagggaaagagggagggaggaagaatcctgcgaaaaggaagggccagactgagggagaagaaaaacatgttcggggcaaaagggtaattctcaagtggggaatgccaaatgaaggggtgcttacatgggggcacaaaattccaaatcagccacagtggggtgaggtgagtatgagacgcaggtgggttgaatgaaggaaagttagtaccacttagggctacaggaccctggggttcttctgtcagaggattggggttcaggtttcaggctttagggtgtaacatgggggggcccagtaggggctatgctggttgcatggggaggccccaggcccctccccaagggcccctccttttgggggaatctcactgacgaggcagagtcgttcactgtagtctggctgcagactctcagccagtcccttagacacaccactccaggcctaaagacagatatgtccaggtcaggggtcaattaggggcaggaagtaaaagaccgagctctgtgccaaaggagtactcatgatgtctgcaaccactgtaattgattacagaagggatacacaggctcctgggcccccaataccagttgccatctgcctcattcaatctataatctgcacttctgtgtgtgtctctctctgtatagtccatgccccatttggtcggccacatcctgacagttagtgcagggcctccttccctctcctctctgcccccacccccacactctgtctgtcttgctggcaggcagttggcagttgatagactgcagcatgcttatgacagcgttctcaccgaaaagttcccgtggtattcagtaacaagatcctctaggttcttcagggtgggaattcggggcatcgtcctgacaggggagaaagagggagcaggagcacataggttaaagcttttttatcacccttctcccagttgtcccatatgaaataaagtgattctgtgttctctgtgcctgtggcttccttccatcaccaaaccctcttgggtaatctctcattacttactgtctcatcctttactcctaaagaccctgcaaaaccctcctctgctattgtcagctaccgttcccctcatttttctgggcttctccaaatctcaccgttccagccagaaatacacacagagaaggctgataatcaatcccatggagccaacagagataaccacggcttccaatgcaaacaggaaaggattctctatagaaaaaagaaaagcaaagtggaccttatatttgttgtgcccctactacatgccaggcactggtgccaggcaccgcgctaaagacatactctctgtttaatcctcacaacagctcctgtgaggcaggaacaattacctccatcttacatcttaggaaacagaatccaagagtttagggatgtggccaaggccaaagaggtagtatgtggcacagcctagatccagctggttccaaagccatcttcaccttgcaggctctctaggaatgcttcagggaaatcctatacattctatagcccccttgagtacccctcagcctccttctcaatccactcccctactctaacaacacgctaacccaaccctacacagaaaaaccttgatttctagaggttggggttagacagtgtggagagatggggcaccaagtttaggggctttagtgacagggaagtggagcaaaagacagtggtgttagaaaggctggggtgttgggctcatggattgggtcatgtgggcccattttaccttttgaagtattgctcccccagtggattgggtggctccattcactccaatgctgagcacttccacagagtgggttaaagcggctccgaacacgaaacgtgtagcgtttctgcccatccacactaggcaaggagaacttatgtctataatccactgattgttccttgaggagaaagaggatgagggaaagtgggtgtctatgagagaagggagaattaaaacatactcctgaacacccaccagtgtcatctctgctactgcccagtttctctctcatctcttgactactcaagccacactgctcccttcactgacttgaatctaatgcctcccctctggatccccttaatggcttccttttgtttacttgtctatctggtatcaggaagagtatgggtagggaatccctaatgaaaactcactggtgtcaggaatggtggctcacgcctgtaatcccagcactttgggaggccgaggtgggcagatcacctgaggtcaggagttcaagaccagcctgaccaacatggcaaaaccctgtctttactaaaaatacaaaaattagccaggcatggttgtgcatgctcccagctacttgggaggctgaagcaggagaatcacttgaaccagggagacagaggtcgcagtgagcccaagatcgccccactgcactcaagcctgggcaacagagtgaggctctgtctcaaaaaaaaaaaaaaaagaaagaaagaaagaaaagaaaagaaaaaaagaaaactcactggagaaaataggggggaaaggagttggaggagggagggtagggggtgagcagagaagctgggaggcagagaacaggagcttgatattaggtccttctatctgtctggttgaatcctttagccctactttcttggccttagctgctacattcacgtccctagtcactcacagtccagctgtggtcccagtcagtccggtactgcaccaagtgctccaaacagtggttcaagaatctgttgttccagttcagttctagctgggattcactcagtttgtgaagtgttaggttctctggagcccaggggatcactggagatatgtgtgcatatgtggtcattcccctggcctagacaagtcaggatcctgaaggtagtgcccctaatacctcctcccttcccatcatgatcccctacctcctcttttctgcccatgtacccttatgataaaagaacactactctgtagactccaatgtcccacagtatccctggtctcttgaccctttctttccaaattacccagattctgcagttttagcatctgtgtggcctgtctcctgggttcccgtgggtcctggagctgaacaacaaatgtttggtagaggtggatctcctttttttgcaactgacagccagaagtgatttcttcagagaatagatagtggctgcacttctggactttatcattatccgagttcttgtacctagaggagaaaggttggaaggaagaggaacagtggggccaatctgggtactgcagatatccagagcctagcctcatctcccctcaaccgacttatgacttaccccaggagaaaacagtggggtacctgggagacttgctaccctctctcttggtctctgatccaacccacctcttcttcatcccctccccctcgtcccttctcataccaataatgcagagtgaggttggtaggctggggctcagagctgctgttccaagtgcaattcatgtactcgacattgaacacaaaacactgaacctctgggaggggcagagtggaaacactgagggagtcagtgggcatagtggtcaggaagaaatctagattggggagaaaatgaaggcagggagggaaagagaaatgatggtcagaaggaggaggccaagcacggtggctcatgtctgtaatcctggtgctttgaaaggctgaggcaggaggatcactagaggccaggagtttgagaccagcctaggcaacatagtgagaccctgcctcaaaagaaagaaagaaacaaacaaacaagaaagaaagaaagaagaagtagcgtgaggcagggaaccctcccccttgcccttcccactccacttttcaattctgcccacatgattgtaatggccagtggcaggcaccagatctctgtacggccccttcccacagccacccttctcaccagccccctccagtcccagatttcccaccagctgtggtgtcttcattcccattgggcgtcagaattgtcgtgttcagccccactcccagcaggggcagctgcaggaataagagggatgtgaatggtaatgatggcttcaacatggcgcttgctcttcattccctgggtgtagtctgtctgtgtcaggaacctgggtccctcacccactacccctccccacccacacgtttcctctgtcatagcttccggtggaaagaaccttataaaccagggctttacagagggtgtggcaaatatgtgctgtgtgacacgggctaagtcctctaggagattaggtgctgctgtaaggtggtaaacagaaactaaagctggatatacaatagtgtcacagactcaaaaatcctcagcccacctagatcctgggaaggatctgttcactgcggccgcatgttcttttttttttttttttttttttttaatgccgatcagttaaggatcagttcactattcgtc

SEQ ID NO: 669 - DNA, 251 bp, unidentified
  source 1..251: mol_type = other DNA
cacgtggtgaactgatccttaactgatcggcattatttctcgatcattattattttttggcgatcgcttttttttttttttttagcaaattggtaatactcctgcctccacagttttttttttttttttgcgatcgccttttttttttttttttttttttaatgccgatcagttaaggatcagttcaccacgtgttttttttttttttttttttcagctatagtgaactgatccttaactgatcggcatta

SEQ ID NO: 670 - DNA, 248 bp, unidentified
  source 1..248: mol_type = other DNA
taatgccgatcagttaaggatcagttcacagtatgaatttttttttttttttttatcatcgtgaactgatccttaactgatcggcattattttttttttttttttttttttggcgatcgcttttttttttttttttccttctcctctaaatcattaccttctataattttttttttttttttgcgatcgcctttttttttttttgatacattttaatgccgatcagttaaggatcagttcacgatgat

SEQ ID NO: 671 - DNA, 4714 bp, unidentified
  source 1..4714: mol_type = other DNA
ttcatactgtgaactgatccttaactgatcggcattattttttttttttttttttttttgaacatgcggccgcgtgaacagatccttcccaggatctaggtgggctgaggatttttgagtctgtgacactattgtatatccagctttagtttctgtttaccaccttacagcagcacctaatctcctagaggacttagcccgtgtcacacagcacatatttgccacaccctctgtaaagccctggtttataaggttctttccaccggaagctatgacagaggaaacgtgtgggtggggaggggtagtgggtgagggacccaggttcctgacacagacagactacacccagggaatgaagagcaagcgccatgttgaagccatcattaccattcacatccctcttattcctgcagctgcccctgctgggagtggggctgaacacgacaattctgacgcccaatgggaatgaagacaccacagctggtgggaaatctgggactggagggggctggtgagaagggtggctgtgggaaggggccgtacagagatctggtgcctgccactggccattacaatcatgtgggcagaattgaaaagtggagtgggaagggcaagggggagggttccctgcctcacgctacttcttctttctttctttcttgtttgtttgtttctttctttcttttgaggcagggtctcactatgttgcctaggctggtctcaaactcctggcctctagtgatcctcctgcctcagcctttcaaagcaccaggattacagacatgagccaccgtgcttggcctcctccttctgaccatcatttctctttccctccctgccttcattttctccccaatctagatttcttcctgaccactatgcccactgactccctcagtgtttccactctgcccctcccagaggttcagtgttttgtgttcaatgtcgagtacatgaattgcacttggaacagcagctctgagccccagcctaccaacctcactctgcattattggtatgagaagggacgagggggaggggatgaagaagaggtgggttggatcagagaccaagagagagggtagcaagtctcccaggtaccccactgttttctcctggggtaagtcataagtcggttgaggggagatgaggctaggctctggatatctgcagtacccagattggccccactgttcctcttccttccaacctttctcctctaggtacaagaactcggataatgataaagtccagaagtgcagccactatctattctctgaagaaatcacttctggctgtcagttgcaaaaaaaggagatccacctctaccaaacatttgttgttcagctccaggacccacgggaacccaggagacaggccacacagatgctaaaactgcagaatctgggtaatttggaaagaaagggtcaagagaccagggatactgtgggacattggagtctacagagtagtgttcttttatcataagggtacatgggcagaaaagaggaggtaggggatcatgatgggaagggaggaggtattaggggcactaccttcaggatcctgacttgtctaggccaggggaatgaccacatatgcacacatatctccagtgatcccctgggctccagagaacctaacacttcacaaactgagtgaatcccagctagaactgaactggaacaacagattcttgaaccactgtttggagcacttggtgcagtaccggactgactgggaccacagctggactgtgagtgactagggacgtgaatgtagcagctaaggccaagaaagtagggctaaaggattcaaccagacagatagaaggacctaatatcaagctcctgttctctgcctcccagcttctctgctcaccccctaccctccctcctccaactcctttcccccctattttctccagtgagttttctttttttcttttcttttctttctttctttcttttttttttttttttgagacagagcctcactctgttgcccaggcttgagtgcagtggggcgatcttgggctcactgcgacctctgtctccctggttcaagtgattctcctgcttcagcctcccaagtagctgggagcatgcacaaccatgcctggctaatttttgtatttttagtaaagacagggttttgccatgttggtcaggctggtcttgaactcctgacctcaggtgatctgcccacctcggcctcccaaagtgctgggattacaggcgtgagccaccattcctgacaccagtgagttttcattagggattccctacccatactcttcctgataccagatagacaagtaaacaaaaggaagccattaaggggatccagaggggaggcattagattcaagtcagtgaagggagcagtgtggcttgagtagtcaagagatgagagagaaactgggcagtagcagagatgacactggtgggtgttcaggagtatgttttaattctcccttctctcatagacacccactttccctcatcctctttctcctcaaggaacaatcagtggattatagacataagttctccttgcctagtgtggatgggcagaaacgctacacgtttcgtgttcggagccgctttaacccactctgtggaagtgctcagcattggagtgaatggagccacccaatccactgggggagcaatacttcaaaaggtaaaatgggcccacatgacccaatccatgagcccaacaccccagcctttctaacaccactgtcttttgctccacttccctgtcactaaagcccctaaacttggtgccccatctctccacactgtctaaccccaacctctagaaatcaaggtttttctgtgtagggttgggttagcgtgttgttagagtaggggagtggattgagaaggaggctgaggggtactcaagggggctatagaatgtataggatttccctgaagcattcctagagagcctgcaaggtgaagatggctttggaaccagctggatctaggctgtgccacatactacctctttggccttggccacatccctaaactcttggattctgtttcctaagatgtaagatggaggtaattgttcctgcctcacaggagctgttgtgaggattaaacagagagtatgtctttagcgcggtgcctggcaccagtgcctggcatgtagtaggggcacaacaaatataaggtccactttgcttttcttttttctatagagaatcctttcctgtttgcattggaagccgtggttatctctgttggctccatgggattgattatcagccttctctgtgtgtatttctggctggaacggtgagatttggagaagcccagaaaaatgaggggaacggtagctgacaatagcagaggagggttttgcagggtctttaggagtaaaggatgagacagtaagtaatgagagattacccaagagggtttggtgatggaaggaagccacaggcacagagaacacagaatcactttatttcatatgggacaactgggagaagggtgataaaaaagctttaacctatgtgctcctgctccctctttctcccctgtcaggacgatgccccgaattcccaccctgaagaacctagaggatcttgttactgaataccacgggaacttttcggtgagaacgctgtcataagcatgctgcagtctatcaactgccaactgcctgccagcaagacagacagagtgtgggggtgggggcagagaggagagggaaggaggccctgcactaactgtcaggatgtggccgaccaaatggggcatggactatacagagagagacacacacagaagtgcagattatagattgaatgaggcagatggcaactggtattgggggcccaggagcctgtgtatcccttctgtaatcaattacagtggttgcagacatcatgagtactcctttggcacagagctcggtcttttacttcctgcccctaattgacccctgacctggacatatctgtctttaggcctggagtggtgtgtctaagggactggctgagagtctgcagccagactacagtgaacgactctgcctcgtcagtgagattcccccaaaaggaggggcccttggggaggggcctggggcctccccatgcaaccagcatagcccctactgggcccccccatgttacaccctaaagcctgaaacctgaaccccaatcctctgacagaagaaccccagggtcctgtagccctaagtggtactaactttccttcattcaacccacctgcgtctcatactcacctcaccccactgtggctgatttggaattttgtgcccccatgtaagcaccccttcatttggcattccccacttgagaattacccttttgccccgaacatgtttttcttctccctcagtctggcccttccttttcgcaggattcttcctccctccctctttccctcccttcctctttccatctaccctccgattgttcctgaaccgatgagaaataaagtttctgttgataatcatcaaaaatgtctgtcatgggggtggggagcaggggaagcctgggatgcaatgagggtgggaggggaagaaaaaggagtagtacattcatgctgtggaggcatctaaaaaaataaaaaaaataaaaaaagcattattgactgatgcatgtaaccttttttttttttttttttttttttaatgccgatcagttaaggatcagttcactatagctg

SEQ ID NO: 672 - DNA, 248 bp, unidentified
  source 1..248: mol_type = other DNA
gtgaactgatccttaactgatcggcattagtagtgtatttttttttttttttttatcatctaatgccgatcagttaaggatcagttcacttttttttttttttttttttttggcgatcgcttttttttttttttttgctagaaagagtactgttctggaaactgacttttttttttttttttgcgatcgcctttttttttttttgatacatttgtgaactgatccttaactgatcggcattagatgat

SEQ ID NO: 673 - DNA, 251 bp, unidentified
  source 1..251: mol_type = other DNA
cacgtgtaatgccgatcagttaaggatcagttcactttctcgatcattattattttttggcgatcgcttttttttttttttttgttgagaatggtgctagtggtagtgaacagttttttttttttttttgcgatcgcctttttttttttttttttttttgtgaactgatccttaactgatcggcattacacgtgttttttttttttttttttttgacgaatataatgccgatcagttaaggatcagttcac

SEQ ID NO: 674 - DNA, 4715 bp, unidentified
  source 1..4715: mol_type = other DNA
tacactactaatgccgatcagttaaggatcagttcacttttttttttttttttttttttggttacatgcatcagtcaataatgctttttttattttttttatttttttagatgcctccacagcatgaatgtactactcctttttcttcccctcccaccctcattgcatcccaggcttcccctgctccccacccccatgacagacatttttgatgattatcaacagaaactttatttctcatcggttcaggaacaatcggagggtagatggaaagaggaagggagggaaagagggagggaggaagaatcctgcgaaaaggaagggccagactgagggagaagaaaaacatgttcggggcaaaagggtaattctcaagtggggaatgccaaatgaaggggtgcttacatgggggcacaaaattccaaatcagccacagtggggtgaggtgagtatgagacgcaggtgggttgaatgaaggaaagttagtaccacttagggctacaggaccctggggttcttctgtcagaggattggggttcaggtttcaggctttagggtgtaacatgggggggcccagtaggggctatgctggttgcatggggaggccccaggcccctccccaagggcccctccttttgggggaatctcactgacgaggcagagtcgttcactgtagtctggctgcagactctcagccagtcccttagacacaccactccaggcctaaagacagatatgtccaggtcaggggtcaattaggggcaggaagtaaaagaccgagctctgtgccaaaggagtactcatgatgtctgcaaccactgtaattgattacagaagggatacacaggctcctgggcccccaataccagttgccatctgcctcattcaatctataatctgcacttctgtgtgtgtctctctctgtatagtccatgccccatttggtcggccacatcctgacagttagtgcagggcctccttccctctcctctctgcccccacccccacactctgtctgtcttgctggcaggcagttggcagttgatagactgcagcatgcttatgacagcgttctcaccgaaaagttcccgtggtattcagtaacaagatcctctaggttcttcagggtgggaattcggggcatcgtcctgacaggggagaaagagggagcaggagcacataggttaaagcttttttatcacccttctcccagttgtcccatatgaaataaagtgattctgtgttctctgtgcctgtggcttccttccatcaccaaaccctcttgggtaatctctcattacttactgtctcatcctttactcctaaagaccctgcaaaaccctcctctgctattgtcagctaccgttcccctcatttttctgggcttctccaaatctcaccgttccagccagaaatacacacagagaaggctgataatcaatcccatggagccaacagagataaccacggcttccaatgcaaacaggaaaggattctctatagaaaaaagaaaagcaaagtggaccttatatttgttgtgcccctactacatgccaggcactggtgccaggcaccgcgctaaagacatactctctgtttaatcctcacaacagctcctgtgaggcaggaacaattacctccatcttacatcttaggaaacagaatccaagagtttagggatgtggccaaggccaaagaggtagtatgtggcacagcctagatccagctggttccaaagccatcttcaccttgcaggctctctaggaatgcttcagggaaatcctatacattctatagcccccttgagtacccctcagcctccttctcaatccactcccctactctaacaacacgctaacccaaccctacacagaaaaaccttgatttctagaggttggggttagacagtgtggagagatggggcaccaagtttaggggctttagtgacagggaagtggagcaaaagacagtggtgttagaaaggctggggtgttgggctcatggattgggtcatgtgggcccattttaccttttgaagtattgctcccccagtggattgggtggctccattcactccaatgctgagcacttccacagagtgggttaaagcggctccgaacacgaaacgtgtagcgtttctgcccatccacactaggcaaggagaacttatgtctataatccactgattgttccttgaggagaaagaggatgagggaaagtgggtgtctatgagagaagggagaattaaaacatactcctgaacacccaccagtgtcatctctgctactgcccagtttctctctcatctcttgactactcaagccacactgctcccttcactgacttgaatctaatgcctcccctctggatccccttaatggcttccttttgtttacttgtctatctggtatcaggaagagtatgggtagggaatccctaatgaaaactcactggtgtcaggaatggtggctcacgcctgtaatcccagcactttgggaggccgaggtgggcagatcacctgaggtcaggagttcaagaccagcctgaccaacatggcaaaaccctgtctttactaaaaatacaaaaattagccaggcatggttgtgcatgctcccagctacttgggaggctgaagcaggagaatcacttgaaccagggagacagaggtcgcagtgagcccaagatcgccccactgcactcaagcctgggcaacagagtgaggctctgtctcaaaaaaaaaaaaaaaagaaagaaagaaagaaaagaaaagaaaaaaagaaaactcactggagaaaataggggggaaaggagttggaggagggagggtagggggtgagcagagaagctgggaggcagagaacaggagcttgatattaggtccttctatctgtctggttgaatcctttagccctactttcttggccttagctgctacattcacgtccctagtcactcacagtccagctgtggtcccagtcagtccggtactgcaccaagtgctccaaacagtggttcaagaatctgttgttccagttcagttctagctgggattcactcagtttgtgaagtgttaggttctctggagcccaggggatcactggagatatgtgtgcatatgtggtcattcccctggcctagacaagtcaggatcctgaaggtagtgcccctaatacctcctcccttcccatcatgatcccctacctcctcttttctgcccatgtacccttatgataaaagaacactactctgtagactccaatgtcccacagtatccctggtctcttgaccctttctttccaaattacccagattctgcagttttagcatctgtgtggcctgtctcctgggttcccgtgggtcctggagctgaacaacaaatgtttggtagaggtggatctcctttttttgcaactgacagccagaagtgatttcttcagagaatagatagtggctgcacttctggactttatcattatccgagttcttgtacctagaggagaaaggttggaaggaagaggaacagtggggccaatctgggtactgcagatatccagagcctagcctcatctcccctcaaccgacttatgacttaccccaggagaaaacagtggggtacctgggagacttgctaccctctctcttggtctctgatccaacccacctcttcttcatcccctccccctcgtcccttctcataccaataatgcagagtgaggttggtaggctggggctcagagctgctgttccaagtgcaattcatgtactcgacattgaacacaaaacactgaacctctgggaggggcagagtggaaacactgagggagtcagtgggcatagtggtcaggaagaaatctagattggggagaaaatgaaggcagggagggaaagagaaatgatggtcagaaggaggaggccaagcacggtggctcatgtctgtaatcctggtgctttgaaaggctgaggcaggaggatcactagaggccaggagtttgagaccagcctaggcaacatagtgagaccctgcctcaaaagaaagaaagaaacaaacaaacaagaaagaaagaaagaagaagtagcgtgaggcagggaaccctcccccttgcccttcccactccacttttcaattctgcccacatgattgtaatggccagtggcaggcaccagatctctgtacggccccttcccacagccacccttctcaccagccccctccagtcccagatttcccaccagctgtggtgtcttcattcccattgggcgtcagaattgtcgtgttcagccccactcccagcaggggcagctgcaggaataagagggatgtgaatggtaatgatggcttcaacatggcgcttgctcttcattccctgggtgtagtctgtctgtgtcaggaacctgggtccctcacccactacccctccccacccacacgtttcctctgtcatagcttccggtggaaagaaccttataaaccagggctttacagagggtgtggcaaatatgtgctgtgtgacacgggctaagtcctctaggagattaggtgctgctgtaaggtggtaaacagaaactaaagctggatatacaatagtgtcacagactcaaaaatcctcagcccacctagatcctgggaaggatctgttcactgcggccgcatgttctttttttttttttttttttttttgtgaactgatccttaactgatcggcattatattcgtc

SEQ ID NO: 675 - DNA, 251 bp, unidentified
  source 1..251: mol_type = other DNA
cacgtgtaatgccgatcagttaaggatcagttcactttctcgatcattattattttttggcgatcgcttttttttttttttttagcaaattggtaatactcctgcctccacagttttttttttttttttgcgatcgcctttttttttttttttttttttgtgaactgatccttaactgatcggcattacacgtgttttttttttttttttttttcagctatataatgccgatcagttaaggatcagttcac

SEQ ID NO: 676 - DNA, 248 bp, unidentified
  source 1..248: mol_type = other DNA
gtgaactgatccttaactgatcggcattaagtatgaatttttttttttttttttatcatctaatgccgatcagttaaggatcagttcacttttttttttttttttttttttggcgatcgcttttttttttttttttccttctcctctaaatcattaccttctataattttttttttttttttgcgatcgcctttttttttttttgatacatttgtgaactgatccttaactgatcggcattagatgat

SEQ ID NO: 677 - DNA, 4714 bp, unidentified
  source 1..4714: mol_type = other DNA
ttcatacttaatgccgatcagttaaggatcagttcacttttttttttttttttttttttgaacatgcggccgcgtgaacagatccttcccaggatctaggtgggctgaggatttttgagtctgtgacactattgtatatccagctttagtttctgtttaccaccttacagcagcacctaatctcctagaggacttagcccgtgtcacacagcacatatttgccacaccctctgtaaagccctggtttataaggttctttccaccggaagctatgacagaggaaacgtgtgggtggggaggggtagtgggtgagggacccaggttcctgacacagacagactacacccagggaatgaagagcaagcgccatgttgaagccatcattaccattcacatccctcttattcctgcagctgcccctgctgggagtggggctgaacacgacaattctgacgcccaatgggaatgaagacaccacagctggtgggaaatctgggactggagggggctggtgagaagggtggctgtgggaaggggccgtacagagatctggtgcctgccactggccattacaatcatgtgggcagaattgaaaagtggagtgggaagggcaagggggagggttccctgcctcacgctacttcttctttctttctttcttgtttgtttgtttctttctttcttttgaggcagggtctcactatgttgcctaggctggtctcaaactcctggcctctagtgatcctcctgcctcagcctttcaaagcaccaggattacagacatgagccaccgtgcttggcctcctccttctgaccatcatttctctttccctccctgccttcattttctccccaatctagatttcttcctgaccactatgcccactgactccctcagtgtttccactctgcccctcccagaggttcagtgttttgtgttcaatgtcgagtacatgaattgcacttggaacagcagctctgagccccagcctaccaacctcactctgcattattggtatgagaagggacgagggggaggggatgaagaagaggtgggttggatcagagaccaagagagagggtagcaagtctcccaggtaccccactgttttctcctggggtaagtcataagtcggttgaggggagatgaggctaggctctggatatctgcagtacccagattggccccactgttcctcttccttccaacctttctcctctaggtacaagaactcggataatgataaagtccagaagtgcagccactatctattctctgaagaaatcacttctggctgtcagttgcaaaaaaaggagatccacctctaccaaacatttgttgttcagctccaggacccacgggaacccaggagacaggccacacagatgctaaaactgcagaatctgggtaatttggaaagaaagggtcaagagaccagggatactgtgggacattggagtctacagagtagtgttcttttatcataagggtacatgggcagaaaagaggaggtaggggatcatgatgggaagggaggaggtattaggggcactaccttcaggatcctgacttgtctaggccaggggaatgaccacatatgcacacatatctccagtgatcccctgggctccagagaacctaacacttcacaaactgagtgaatcccagctagaactgaactggaacaacagattcttgaaccactgtttggagcacttggtgcagtaccggactgactgggaccacagctggactgtgagtgactagggacgtgaatgtagcagctaaggccaagaaagtagggctaaaggattcaaccagacagatagaaggacctaatatcaagctcctgttctctgcctcccagcttctctgctcaccccctaccctccctcctccaactcctttcccccctattttctccagtgagttttctttttttcttttcttttctttctttctttcttttttttttttttttgagacagagcctcactctgttgcccaggcttgagtgcagtggggcgatcttgggctcactgcgacctctgtctccctggttcaagtgattctcctgcttcagcctcccaagtagctgggagcatgcacaaccatgcctggctaatttttgtatttttagtaaagacagggttttgccatgttggtcaggctggtcttgaactcctgacctcaggtgatctgcccacctcggcctcccaaagtgctgggattacaggcgtgagccaccattcctgacaccagtgagttttcattagggattccctacccatactcttcctgataccagatagacaagtaaacaaaaggaagccattaaggggatccagaggggaggcattagattcaagtcagtgaagggagcagtgtggcttgagtagtcaagagatgagagagaaactgggcagtagcagagatgacactggtgggtgttcaggagtatgttttaattctcccttctctcatagacacccactttccctcatcctctttctcctcaaggaacaatcagtggattatagacataagttctccttgcctagtgtggatgggcagaaacgctacacgtttcgtgttcggagccgctttaacccactctgtggaagtgctcagcattggagtgaatggagccacccaatccactgggggagcaatacttcaaaaggtaaaatgggcccacatgacccaatccatgagcccaacaccccagcctttctaacaccactgtcttttgctccacttccctgtcactaaagcccctaaacttggtgccccatctctccacactgtctaaccccaacctctagaaatcaaggtttttctgtgtagggttgggttagcgtgttgttagagtaggggagtggattgagaaggaggctgaggggtactcaagggggctatagaatgtataggatttccctgaagcattcctagagagcctgcaaggtgaagatggctttggaaccagctggatctaggctgtgccacatactacctctttggccttggccacatccctaaactcttggattctgtttcctaagatgtaagatggaggtaattgttcctgcctcacaggagctgttgtgaggattaaacagagagtatgtctttagcgcggtgcctggcaccagtgcctggcatgtagtaggggcacaacaaatataaggtccactttgcttttcttttttctatagagaatcctttcctgtttgcattggaagccgtggttatctctgttggctccatgggattgattatcagccttctctgtgtgtatttctggctggaacggtgagatttggagaagcccagaaaaatgaggggaacggtagctgacaatagcagaggagggttttgcagggtctttaggagtaaaggatgagacagtaagtaatgagagattacccaagagggtttggtgatggaaggaagccacaggcacagagaacacagaatcactttatttcatatgggacaactgggagaagggtgataaaaaagctttaacctatgtgctcctgctccctctttctcccctgtcaggacgatgccccgaattcccaccctgaagaacctagaggatcttgttactgaataccacgggaacttttcggtgagaacgctgtcataagcatgctgcagtctatcaactgccaactgcctgccagcaagacagacagagtgtgggggtgggggcagagaggagagggaaggaggccctgcactaactgtcaggatgtggccgaccaaatggggcatggactatacagagagagacacacacagaagtgcagattatagattgaatgaggcagatggcaactggtattgggggcccaggagcctgtgtatcccttctgtaatcaattacagtggttgcagacatcatgagtactcctttggcacagagctcggtcttttacttcctgcccctaattgacccctgacctggacatatctgtctttaggcctggagtggtgtgtctaagggactggctgagagtctgcagccagactacagtgaacgactctgcctcgtcagtgagattcccccaaaaggaggggcccttggggaggggcctggggcctccccatgcaaccagcatagcccctactgggcccccccatgttacaccctaaagcctgaaacctgaaccccaatcctctgacagaagaaccccagggtcctgtagccctaagtggtactaactttccttcattcaacccacctgcgtctcatactcacctcaccccactgtggctgatttggaattttgtgcccccatgtaagcaccccttcatttggcattccccacttgagaattacccttttgccccgaacatgtttttcttctccctcagtctggcccttccttttcgcaggattcttcctccctccctctttccctcccttcctctttccatctaccctccgattgttcctgaaccgatgagaaataaagtttctgttgataatcatcaaaaatgtctgtcatgggggtggggagcaggggaagcctgggatgcaatgagggtgggaggggaagaaaaaggagtagtacattcatgctgtggaggcatctaaaaaaataaaaaaaataaaaaaagcattattgactgatgcatgtaacctttttttttttttttttttttttgtgaactgatccttaactgatcggcattatatagctg

SEQ ID NO: 678 - DNA, 242 bp, unidentified
  source 1..242: mol_type = other DNA
taatgccgatcagttaaggatcagttcacgtagtgtatttttttttttttttttatcatcgtgaactgatccttaactgatcggcattattttttttttttttttttttttgcgaccttttttttttttttttgctagaaagagtactgttctggaaactgacttttttttttttttttggtcgctttttttttttttgatacattttaatgccgatcagttaaggatcagttcacgatgat

SEQ ID NO: 679 - DNA, 244 bp, unidentified
  source 1..244: mol_type = other DNA
cacgtggtgaactgatccttaactgatcggcattatttctcgatcattattattttttgcgaccttttttttttttttttgttgagaatggtgctagtggtagtgaacagtttttttttttttttggtcgcttttttttttttttttttttttaatgccgatcagttaaggatcagttcaccacgtgttttttttttttttttttttgacgaatagtgaactgatccttaactgatcggcatta

SEQ ID NO: 680 - DNA, 4715 bp, unidentified; identical to SEQ ID NO: 668
  source 1..4715: mol_type = other DNA

SEQ ID NO: 681 - DNA, 245 bp, unidentified
  source 1..245: mol_type = other DNA
cacgtggtgaactgatccttaactgatcggcattatttctcgatcattattattttttgcgaccttttttttttttttttagcaaattggtaatactcctgcctccacagttttttttttttttttggtcgcttttttttttttttttttttttaatgccgatcagttaaggatcagttcaccacgtgttttttttttttttttttttcagctatagtgaactgatccttaactgatcggcatta

SEQ ID NO: 682 - DNA, 242 bp, unidentified
  source 1..242: mol_type = other DNA
taatgccgatcagttaaggatcagttcacagtatgaatttttttttttttttttatcatcgtgaactgatccttaactgatcggcattattttttttttttttttttttttgcgaccttttttttttttttttccttctcctctaaatcattaccttctataattttttttttttttttggtcgctttttttttttttgatacattttaatgccgatcagttaaggatcagttcacgatgat

SEQ ID NO: 683 - DNA, 4714 bp, unidentified; identical to SEQ ID NO: 671
  source 1..4714: mol_type = other DNA

SEQ ID NO: 684 - DNA, 242 bp, unidentified
  source 1..242: mol_type = other DNA
gtgaactgatccttaactgatcggcattagtagtgtatttttttttttttttttatcatctaatgccgatcagttaaggatcagttcacttttttttttttttttttttttgcgaccttttttttttttttttgctagaaagagtactgttctggaaactgacttttttttttttttttggtcgctttttttttttttgatacatttgtgaactgatccttaactgatcggcattagatgat

SEQ ID NO: 685 - DNA, 245 bp, unidentified
  source 1..245: mol_type = other DNA
cacgtgtaatgccgatcagttaaggatcagttcactttctcgatcattattattttttgcgaccttttttttttttttttgttgagaatggtgctagtggtagtgaacagttttttttttttttttggtcgctttttttttttttttttttttgtgaactgatccttaactgatcggcattacacgtgttttttttttttttttttttgacgaatataatgccgatcagttaaggatcagttcac

SEQ ID NO: 686 - DNA, 4715 bp, unidentified; identical to SEQ ID NO: 674
  source 1..4715: mol_type = other DNA

SEQ ID NO: 687 - DNA, 245 bp, unidentified
  source 1..245: mol_type = other DNA
cacgtgtaatgccgatcagttaaggatcagttcactttctcgatcattattattttttgcgaccttttttttttttttttagcaaattggtaatactcctgcctccacagttttttttttttttttggtcgctttttttttttttttttttttgtgaactgatccttaactgatcggcattacacgtgttttttttttttttttttttcagctatataatgccgatcagttaaggatcagttcac

SEQ ID NO: 688 - DNA, 242 bp, unidentified
  source 1..242: mol_type = other DNA
gtgaactgatccttaactgatcggcattaagtatgaatttttttttttttttttatcatctaatgccgatcagttaaggatcagttcacttttttttttttttttttttttgcgaccttttttttttttttttccttctcctctaaatcattaccttctataattttttttttttttttggtcgctttttttttttttgatacatttgtgaactgatccttaactgatcggcattagatgat

SEQ ID NO: 689 - DNA, 4714 bp, unidentified; identical to SEQ ID NO: 677
  source 1..4714: mol_type = other DNA

SEQ ID NO: 690 - DNA, 254 bp, unidentified
  source 1..254: mol_type = other DNA
taatgccgatcagttaaggatcagttcacgtagtgtatttttttttttttttttatcatcgtgaactgatccttaactgatcggcattattttttttttttttttttttttgcggcgatcggcttttttttttttttttgctagaaagagtactgttctggaaactgacttttttttttttttttgccgatcgccgctttttttttttttgatacattttaatgccgatcagttaaggatcagttcacgatgat

SEQ ID NO: 691 - DNA, 257 bp, unidentified
  source 1..257: mol_type = other DNA
cacgtggtgaactgatccttaactgatcggcattatttctcgatcattattattttttgcggcgatcggcttttttttttttttttgttgagaatggtgctagtggtagtgaacagttttttttttttttttgccgatcgccgcttttttttttttttttttttttaatgccgatcagttaaggatcagttcaccacgtgttttttttttttttttttttgacgaatagtgaactgatccttaactgatcggcatta

SEQ ID NO: 692 - DNA, 4715 bp, unidentified; identical to SEQ ID NO: 668
  source 1..4715: mol_type = other DNA

SEQ ID NO: 693 - DNA, 257 bp, unidentified
  source 1..257: mol_type = other DNA
cacgtggtgaactgatccttaactgatcggcattatttctcgatcattattattttttgcggcgatcggcttttttttttttttttagcaaattggtaatactcctgcctccacagttttttttttttttttgccgatcgccgcttttttttttttttttttttttaatgccgatcagttaaggatcagttcaccacgtgttttttttttttttttttttcagctatagtgaactgatccttaactgatcggcatta

SEQ ID NO: 694 - DNA, 254 bp, unidentified
  source 1..254: mol_type = other DNA
taatgccgatcagttaaggatcagttcacagtatgaatttttttttttttttttatcatcgtgaactgatccttaactgatcggcattattttttttttttttttttttttgcggcgatcggcttttttttttttttttccttctcctctaaatcattaccttctataattttttttttttttttgccgatcgccgctttttttttttttgatacattttaatgccgatcagttaaggatcagttcacgatgat

SEQ ID NO: 695 - DNA, 4714 bp, unidentified; identical to SEQ ID NO: 671
  source 1..4714: mol_type = other DNA

SEQ ID NO: 696 - DNA, 254 bp, unidentified
  source 1..254: mol_type = other DNA
gtgaactgatccttaactgatcggcattagtagtgtatttttttttttttttttatcatctaatgccgatcagttaaggatcagttcacttttttttttttttttttttttgcggcgatcggcttttttttttttttttgctagaaagagtactgttctggaaactgacttttttttttttttttgccgatcgccgctttttttttttttgatacatttgtgaactgatccttaactgatcggcattagatgat

SEQ ID NO: 697 - DNA, 257 bp, unidentified
  source 1..257: mol_type = other DNA
cacgtgtaatgccgatcagttaaggatcagttcactttctcgatcattattattttttgcggcgatcggcttttttttttttttttgttgagaatggtgctagtggtagtgaacagttttttttttttttttgccgatcgccgctttttttttttttttttttttgtgaactgatccttaactgatcggcattacacgtgttttttttttttttttttttgacgaatataatgccgatcagttaaggatcagttcac

SEQ ID NO: 698 - DNA, 4715 bp, unidentified; identical to SEQ ID NO: 674
  source 1..4715: mol_type = other DNA

SEQ ID NO: 699 - DNA, 257 bp, unidentified
  source 1..257: mol_type = other DNA
cacgtgtaatgccgatcagttaaggatcagttcactttctcgatcattattattttttgcggcgatcggcttttttttttttttttagcaaattggtaatactcctgcctccacagttttttttttttttttgccgatcgccgctttttttttttttttttttttgtgaactgatccttaactgatcggcattacacgtgttttttttttttttttttttcagctatataatgccgatcagttaaggatcagttcac

SEQ ID NO: 700 - DNA, 254 bp, unidentified
  source 1..254: mol_type = other DNA
gtgaactgatccttaactgatcggcattaagtatgaatttttttttttttttttatcatctaatgccgatcagttaaggatcagttcacttttttttttttttttttttttgcggcgatcggcttttttttttttttttccttctcctctaaatcattaccttctataattttttttttttttttgccgatcgccgctttttttttttttgatacatttgtgaactgatccttaactgatcggcattagatgat

SEQ ID NO: 701 - DNA, 4714 bp, unidentified; identical to SEQ ID NO: 677
  source 1..4714: mol_type = other DNA

SEQ ID NO: 702 - DNA, 248 bp, unidentified
  source 1..248: mol_type = other DNA
taatgccagtcagttaagcaactgactgggtagtgtatttttttttttttttttatcatcccagtcagttgcttaactgactggcattattttttttttttttttttttttggcgatcgcttttttttttttttttgctagaaagagtactgttctggaaactgacttttttttttttttttgcgatcgcctttttttttttttgatacattttaatgccagtcagttaagcaactgactgggatgat

SEQ ID NO: 703 - DNA, 251 bp, unidentified
  source 1..251: mol_type = other DNA
cacgtgccagtcagttgcttaactgactggcattatttctcgatcattattattttttggcgatcgcttttttttttttttttgttgagaatggtgctagtggtagtgaacagttttttttttttttttgcgatcgccttttttttttttttttttttttaatgccagtcagttaagcaactgactggcacgtgttttttttttttttttttttgacgaataccagtcagttgcttaactgactggcatta

SEQ ID NO: 704 - DNA, 4715 bp, unidentified
  source 1..4715: mol_type = other DNA
tacactacccagtcagttgcttaactgactggcattattttttttttttttttttttttggttacatgcatcagtcaataatgctttttttattttttttatttttttagatgcctccacagcatgaatgtactactcctttttcttcccctcccaccctcattgcatcccaggcttcccctgctccccacccccatgacagacatttttgatgattatcaacagaaactttatttctcatcggttcaggaacaatcggagggtagatggaaagaggaagggagggaaagagggagggaggaagaatcctgcgaaaaggaagggccagactgagggagaagaaaaacatgttcggggcaaaagggtaattctcaagtggggaatgccaaatgaaggggtgcttacatgggggcacaaaattccaaatcagccacagtggggtgaggtgagtatgagacgcaggtgggttgaatgaaggaaagttagtaccacttagggctacaggaccctggggttcttctgtcagaggattggggttcaggtttcaggctttagggtgtaacatgggggggcccagtaggggctatgctggttgcatggggaggccccaggcccctccccaagggcccctccttttgggggaatctcactgacgaggcagagtcgttcactgtagtctggctgcagactctcagccagtcccttagacacaccactccaggcctaaagacagatatgtccaggtcaggggtcaattaggggcaggaagtaaaagaccgagctctgtgccaaaggagtactcatgatgtctgcaaccactgtaattgattacagaagggatacacaggctcctgggcccccaataccagttgccatctgcctcattcaatctataatctgcacttctgtgtgtgtctctctctgtatagtccatgccccatttggtcggccacatcctgacagttagtgcagggcctccttccctctcctctctgcccccacccccacactctgtctgtcttgctggcaggcagttggcagttgatagactgcagcatgcttatgacagcgttctcaccgaaaagttcccgtggtattcagtaacaagatcctctaggttcttcagggtgggaattcggggcatcgtcctgacaggggagaaagagggagcaggagcacataggttaaagcttttttatcacccttctcccagttgtcccatatgaaataaagtgattctgtgttctctgtgcctgtggcttccttccatcaccaaaccctcttgggtaatctctcattacttactgtctcatcctttactcctaaagaccctgcaaaaccctcctctgctattgtcagctaccgttcccctcatttttctgggcttctccaaatctcaccgttccagccagaaatacacacagagaaggctgataatcaatcccatggagccaacagagataaccacggcttccaatgcaaacaggaaaggattctctatagaaaaaagaaaagcaaagtggaccttatatttgttgtgcccctactacatgccaggcactggtgccaggcaccgcgctaaagacatactctctgtttaatcctcacaacagctcctgtgaggcaggaacaattacctccatcttacatcttaggaaacagaatccaagagtttagggatgtggccaaggccaaagaggtagtatgtggcacagcctagatccagctggttccaaagccatcttcaccttgcaggctctctaggaatgcttcagggaaatcctatacattctatagcccccttgagtacccctcagcctccttctcaatccactcccctactctaacaacacgctaacccaaccctacacagaaaaaccttgatttctagaggttggggttagacagtgtggagagatggggcaccaagtttaggggctttagtgacagggaagtggagcaaaagacagtggtgttagaaaggctggggtgttgggctcatggattgggtcatgtgggcccattttaccttttgaagtattgctcccccagtggattgggtggctccattcactccaatgctgagcacttccacagagtgggttaaagcggctccgaacacgaaacgtgtagcgtttctgcccatccacactaggcaaggagaacttatgtctataatccactgattgttccttgaggagaaagaggatgagggaaagtgggtgtctatgagagaagggagaattaaaacatactcctgaacacccaccagtgtcatctctgctactgcccagtttctctctcatctcttgactactcaagccacactgctcccttcactgacttgaatctaatgcctcccctctggatccccttaatggcttccttttgtttacttgtctatctggtatcaggaagagtatgggtagggaatccctaatgaaaactcactggtgtcaggaatggtggctcacgcctgtaatcccagcactttgggaggccgaggtgggcagatcacctgaggtcaggagttcaagaccagcctgaccaacatggcaaaaccctgtctttactaaaaatacaaaaattagccaggcatggttgtgcatgctcccagctacttgggaggctgaagcaggagaatcacttgaaccagggagacagaggtcgcagtgagcccaagatcgccccactgcactcaagcctgggcaacagagtgaggctctgtctcaaaaaaaaaaaaaaaagaaagaaagaaagaaaagaaaagaaaaaaagaaaactcactggagaaaataggggggaaaggagttggaggagggagggtagggggtgagcagagaagctgggaggcagagaacaggagcttgatattaggtccttctatctgtctggttgaatcctttagccctactttcttggccttagctgctacattcacgtccctagtcactcacagtccagctgtggtcccagtcagtccggtactgcaccaagtgctccaaacagtggttcaagaatctgttgttccagttcagttctagctgggattcactcagtttgtgaagtgttaggttctctggagcccaggggatcactggagatatgtgtgcatatgtggtcattcccctggcctagacaagtcaggatcctgaaggtagtgcccctaatacctcctcccttcccatcatgatcccctacctcctcttttctgcccatgtacccttatgataaaagaacactactctgtagactccaatgtcccacagtatccctggtctcttgaccctttctttccaaattacccagattctgcagttttagcatctgtgtggcctgtctcctgggttcccgtgggtcctggagctgaacaacaaatgtttggtagaggtggatctcctttttttgcaactgacagccagaagtgatttcttcagagaatagatagtggctgcacttctggactttatcattatccgagttcttgtacctagaggagaaaggttggaaggaagaggaacagtggggccaatctgggtactgcagatatccagagcctagcctcatctcccctcaaccgacttatgacttaccccaggagaaaacagtggggtacctgggagacttgctaccctctctcttggtctctgatccaacccacctcttcttcatcccctccccctcgtcccttctcataccaataatgcagagtgaggttggtaggctggggctcagagctgctgttccaagtgcaattcatgtactcgacattgaacacaaaacactgaacctctgggaggggcagagtggaaacactgagggagtcagtgggcatagtggtcaggaagaaatctagattggggagaaaatgaaggcagggagggaaagagaaatgatggtcagaaggaggaggccaagcacggtggctcatgtctgtaatcctggtgctttgaaaggctgaggcaggaggatcactagaggccaggagtttgagaccagcctaggcaacatagtgagaccctgcctcaaaagaaagaaagaaacaaacaaacaagaaagaaagaaagaagaagtagcgtgaggcagggaaccctcccccttgcccttcccactccacttttcaattctgcccacatgattgtaatggccagtggcaggcaccagatctctgtacggccccttcccacagccacccttctcaccagccccctccagtcccagatttcccaccagctgtggtgtcttcattcccattgggcgtcagaattgtcgtgttcagccccactcccagcaggggcagctgcaggaataagagggatgtgaatggtaatgatggcttcaacatggcgcttgctcttcattccctgggtgtagtctgtctgtgtcaggaacctgggtccctcacccactacccctccccacccacacgtttcctctgtcatagcttccggtggaaagaaccttataaaccagggctttacagagggtgtggcaaatatgtgctgtgtgacacgggctaagtcctctaggagattaggtgctgctgtaaggtggtaaacagaaactaaagctggatatacaatagtgtcacagactcaaaaatcctcagcccacctagatcctgggaaggatctgttcactgcggccgcatgttcttttttttttttttttttttttttaatgccagtcagttaagcaactgactggtattcgtc

SEQ ID NO: 705 - DNA, 251 bp, unidentified
  source 1..251: mol_type = other DNA
cacgtgccagtcagttgcttaactgactggcattatttctcgatcattattattttttggcgatcgcttttttttttttttttagcaaattggtaatactcctgcctccacagttttttttttttttttgcgatcgccttttttttttttttttttttttaatgccagtcagttaagcaactgactggcacgtgttttttttttttttttttttcagctataccagtcagttgcttaactgactggcatta

SEQ ID NO: 706 - DNA, 248 bp, unidentified
  source 1..248: mol_type = other DNA
taatgccagtcagttaagcaactgactggagtatgaatttttttttttttttttatcatcccagtcagttgcttaactgactggcattattttttttttttttttttttttggcgatcgcttttttttttttttttccttctcctctaaatcattaccttctataattttttttttttttttgcgatcgcctttttttttttttgatacattttaatgccagtcagttaagcaactgactgggatgat

SEQ ID NO: 707 - DNA, 4714 bp, unidentified
  source 1..4714: mol_type = other DNA
ttcatactccagtcagttgcttaactgactggcattattttttttttttttttttttttgaacatgcggccgcgtgaacagatccttcccaggatctaggtgggctgaggatttttgagtctgtgacactattgtatatccagctttagtttctgtttaccaccttacagcagcacctaatctcctagaggacttagcccgtgtcacacagcacatatttgccacaccctctgtaaagccctggtttataaggttctttccaccggaagctatgacagaggaaacgtgtgggtggggaggggtagtgggtgagggacccaggttcctgacacagacagactacacccagggaatgaagagcaagcgccatgttgaagccatcattaccattcacatccctcttattcctgcagctgcccctgctgggagtggggctgaacacgacaattctgacgcccaatgggaatgaagacaccacagctggtgggaaatctgggactggagggggctggtgagaagggtggctgtgggaaggggccgtacagagatctggtgcctgccactggccattacaatcatgtgggcagaattgaaaagtggagtgggaagggcaagggggagggttccctgcctcacgctacttcttctttctttctttcttgtttgtttgtttctttctttcttttgaggcagggtctcactatgttgcctaggctggtctcaaactcctggcctctagtgatcctcctgcctcagcctttcaaagcaccaggattacagacatgagccaccgtgcttggcctcctccttctgaccatcatttctctttccctccctgccttcattttctccccaatctagatttcttcctgaccactatgcccactgactccctcagtgtttccactctgcccctcccagaggttcagtgttttgtgttcaatgtcgagtacatgaattgcacttggaacagcagctctgagccccagcctaccaacctcactctgcattattggtatgagaagggacgagggggaggggatgaagaagaggtgggttggatcagagaccaagagagagggtagcaagtctcccaggtaccccactgttttctcctggggtaagtcataagtcggttgaggggagatgaggctaggctctggatatctgcagtacccagattggccccactgttcctcttccttccaacctttctcctctaggtacaagaactcggataatgataaagtccagaagtgcagccactatctattctctgaagaaatcacttctggctgtcagttgcaaaaaaaggagatccacctctaccaaacatttgttgttcagctccaggacccacgggaacccaggagacaggccacacagatgctaaaactgcagaatctgggtaatttggaaagaaagggtcaagagaccagggatactgtgggacattggagtctacagagtagtgttcttttatcataagggtacatgggcagaaaagaggaggtaggggatcatgatgggaagggaggaggtattaggggcactaccttcaggatcctgacttgtctaggccaggggaatgaccacatatgcacacatatctccagtgatcccctgggctccagagaacctaacacttcacaaactgagtgaatcccagctagaactgaactggaacaacagattcttgaaccactgtttggagcacttggtgcagtaccggactgactgggaccacagctggactgtgagtgactagggacgtgaatgtagcagctaaggccaagaaagtagggctaaaggattcaaccagacagatagaaggacctaatatcaagctcctgttctctgcctcccagcttctctgctcaccccctaccctccctcctccaactcctttcccccctattttctccagtgagttttctttttttcttttcttttctttctttctttcttttttttttttttttgagacagagcctcactctgttgcccaggcttgagtgcagtggggcgatcttgggctcactgcgacctctgtctccctggttcaagtgattctcctgcttcagcctcccaagtagctgggagcatgcacaaccatgcctggctaatttttgtatttttagtaaagacagggttttgccatgttggtcaggctggtcttgaactcctgacctcaggtgatctgcccacctcggcctcccaaagtgctgggattacaggcgtgagccaccattcctgacaccagtgagttttcattagggattccctacccatactcttcctgataccagatagacaagtaaacaaaaggaagccattaaggggatccagaggggaggcattagattcaagtcagtgaagggagcagtgtggcttgagtagtcaagagatgagagagaaactgggcagtagcagagatgacactggtgggtgttcaggagtatgttttaattctcccttctctcatagacacccactttccctcatcctctttctcctcaaggaacaatcagtggattatagacataagttctccttgcctagtgtggatgggcagaaacgctacacgtttcgtgttcggagccgctttaacccactctgtggaagtgctcagcattggagtgaatggagccacccaatccactgggggagcaatacttcaaaaggtaaaatgggcccacatgacccaatccatgagcccaacaccccagcctttctaacaccactgtcttttgctccacttccctgtcactaaagcccctaaacttggtgccccatctctccacactgtctaaccccaacctctagaaatcaaggtttttctgtgtagggttgggttagcgtgttgttagagtaggggagtggattgagaaggaggctgaggggtactcaagggggctatagaatgtataggatttccctgaagcattcctagagagcctgcaaggtgaagatggctttggaaccagctggatctaggctgtgccacatactacctctttggccttggccacatccctaaactcttggattctgtttcctaagatgtaagatggaggtaattgttcctgcctcacaggagctgttgtgaggattaaacagagagtatgtctttagcgcggtgcctggcaccagtgcctggcatgtagtaggggcacaacaaatataaggtccactttgcttttcttttttctatagagaatcctttcctgtttgcattggaagccgtggttatctctgttggctccatgggattgattatcagccttctctgtgtgtatttctggctggaacggtgagatttggagaagcccagaaaaatgaggggaacggtagctgacaatagcagaggagggttttgcagggtctttaggagtaaaggatgagacagtaagtaatgagagattacccaagagggtttggtgatggaaggaagccacaggcacagagaacacagaatcactttatttcatatgggacaactgggagaagggtgataaaaaagctttaacctatgtgctcctgctccctctttctcccctgtcaggacgatgccccgaattcccaccctgaagaacctagaggatcttgttactgaataccacgggaacttttcggtgagaacgctgtcataagcatgctgcagtctatcaactgccaactgcctgccagcaagacagacagagtgtgggggtgggggcagagaggagagggaaggaggccctgcactaactgtcaggatgtggccgaccaaatggggcatggactatacagagagagacacacacagaagtgcagattatagattgaatgaggcagatggcaactggtattgggggcccaggagcctgtgtatcccttctgtaatcaattacagtggttgcagacatcatgagtactcctttggcacagagctcggtcttttacttcctgcccctaattgacccctgacctggacatatctgtctttaggcctggagtggtgtgtctaagggactggctgagagtctgcagccagactacagtgaacgactctgcctcgtcagtgagattcccccaaaaggaggggcccttggggaggggcctggggcctccccatgcaaccagcatagcccctactgggcccccccatgttacaccctaaagcctgaaacctgaaccccaatcctctgacagaagaaccccagggtcctgtagccctaagtggtactaactttccttcattcaacccacctgcgtctcatactcacctcaccccactgtggctgatttggaattttgtgcccccatgtaagcaccccttcatttggcattccccacttgagaattacccttttgccccgaacatgtttttcttctccctcagtctggcccttccttttcgcaggattcttcctccctccctctttccctcccttcctctttccatctaccctccgattgttcctgaaccgatgagaaataaagtttctgttgataatcatcaaaaatgtctgtcatgggggtggggagcaggggaagcctgggatgcaatgagggtgggaggggaagaaaaaggagtagtacattcatgctgtggaggcatctaaaaaaataaaaaaaataaaaaaagcattattgactgatgcatgtaaccttttttttttttttttttttttttaatgccagtcagttaagcaactgactggtatagctg

SEQ ID NO: 708 - DNA, 248 bp, unidentified
  source 1..248: mol_type = other DNA
ccagtcagttgcttaactgactggcattagtagtgtatttttttttttttttttatcatctaatgccagtcagttaagcaactgactggttttttttttttttttttttttggcgatcgcttttttttttttttttgctagaaagagtactgttctggaaactgacttttttttttttttttgcgatcgcctttttttttttttgatacatttccagtcagttgcttaactgactggcattagatgat

SEQ ID NO: 709 - DNA, 251 bp, unidentified
  source 1..251: mol_type = other DNA
cacgtgtaatgccagtcagttaagcaactgactggtttctcgatcattattattttttggcgatcgcttttttttttttttttgttgagaatggtgctagtggtagtgaacagttttttttttttttttgcgatcgcctttttttttttttttttttttccagtcagttgcttaactgactggcattacacgtgttttttttttttttttttttgacgaatataatgccagtcagttaagcaactgactgg

SEQ ID NO: 710 - DNA, 4715 bp, unidentified
  source 1..4715: mol_type = other DNA
tacactactaatgccagtcagttaagcaactgactggttttttttttttttttttttttggttacatgcatcagtcaataatgctttttttattttttttatttttttagatgcctccacagcatgaatgtactactcctttttcttcccctcccaccctcattgcatcccaggcttcccctgctccccacccccatgacagacatttttgatgattatcaacagaaactttatttctcatcggttcaggaacaatcggagggtagatggaaagaggaagggagggaaagagggagggaggaagaatcctgcgaaaaggaagggccagactgagggagaagaaaaacatgttcggggcaaaagggtaattctcaagtggggaatgccaaatgaaggggtgcttacatgggggcacaaaattccaaatcagccacagtggggtgaggtgagtatgagacgcaggtgggttgaatgaaggaaagttagtaccacttagggctacaggaccctggggttcttctgtcagaggattggggttcaggtttcaggctttagggtgtaacatgggggggcccagtaggggctatgctggttgcatggggaggccccaggcccctccccaagggcccctccttttgggggaatctcactgacgaggcagagtcgttcactgtagtctggctgcagactctcagccagtcccttagacacaccactccaggcctaaagacagatatgtccaggtcaggggtcaattaggggcaggaagtaaaagaccgagctctgtgccaaaggagtactcatgatgtctgcaaccactgtaattgattacagaagggatacacaggctcctgggcccccaataccagttgccatctgcctcattcaatctataatctgcacttctgtgtgtgtctctctctgtatagtccatgccccatttggtcggccacatcctgacagttagtgcagggcctccttccctctcctctctgcccccacccccacactctgtctgtcttgctggcaggcagttggcagttgatagactgcagcatgcttatgacagcgttctcaccgaaaagttcccgtggtattcagtaacaagatcctctaggttcttcagggtgggaattcggggcatcgtcctgacaggggagaaagagggagcaggagcacataggttaaagcttttttatcacccttctcccagttgtcccatatgaaataaagtgattctgtgttctctgtgcctgtggcttccttccatcaccaaaccctcttgggtaatctctcattacttactgtctcatcctttactcctaaagaccctgcaaaaccctcctctgctattgtcagctaccgttcccctcatttttctgggcttctccaaatctcaccgttccagccagaaatacacacagagaaggctgataatcaatcccatggagccaacagagataaccacggcttccaatgcaaacaggaaaggattctctatagaaaaaagaaaagcaaagtggaccttatatttgttgtgcccctactacatgccaggcactggtgccaggcaccgcgctaaagacatactctctgtttaatcctcacaacagctcctgtgaggcaggaacaattacctccatcttacatcttaggaaacagaatccaagagtttagggatgtggccaaggccaaagaggtagtatgtggcacagcctagatccagctggttccaaagccatcttcaccttgcaggctctctaggaatgcttcagggaaatcctatacattctatagcccccttgagtacccctcagcctccttctcaatccactcccctactctaacaacacgctaacccaaccctacacagaaaaaccttgatttctagaggttggggttagacagtgtggagagatggggcaccaagtttaggggctttagtgacagggaagtggagcaaaagacagtggtgttagaaaggctggggtgttgggctcatggattgggtcatgtgggcccattttaccttttgaagtattgctcccccagtggattgggtggctccattcactccaatgctgagcacttccacagagtgggttaaagcggctccgaacacgaaacgtgtagcgtttctgcccatccacactaggcaaggagaacttatgtctataatccactgattgttccttgaggagaaagaggatgagggaaagtgggtgtctatgagagaagggagaattaaaacatactcctgaacacccaccagtgtcatctctgctactgcccagtttctctctcatctcttgactactcaagccacactgctcccttcactgacttgaatctaatgcctcccctctggatccccttaatggcttccttttgtttacttgtctatctggtatcaggaagagtatgggtagggaatccctaatgaaaactcactggtgtcaggaatggtggctcacgcctgtaatcccagcactttgggaggccgaggtgggcagatcacctgaggtcaggagttcaagaccagcctgaccaacatggcaaaaccctgtctttactaaaaatacaaaaattagccaggcatggttgtgcatgctcccagctacttgggaggctgaagcaggagaatcacttgaaccagggagacagaggtcgcagtgagcccaagatcgccccactgcactcaagcctgggcaacagagtgaggctctgtctcaaaaaaaaaaaaaaaagaaagaaagaaagaaaagaaaagaaaaaaagaaaactcactggagaaaataggggggaaaggagttggaggagggagggtagggggtgagcagagaagctgggaggcagagaacaggagcttgatattaggtccttctatctgtctggttgaatcctttagccctactttcttggccttagctgctacattcacgtccctagtcactcacagtccagctgtggtcccagtcagtccggtactgcaccaagtgctccaaacagtggttcaagaatctgttgttccagttcagttctagctgggattcactcagtttgtgaagtgttaggttctctggagcccaggggatcactggagatatgtgtgcatatgtggtcattcccctggcctagacaagtcaggatcctgaaggtagtgcccctaatacctcctcccttcccatcatgatcccctacctcctcttttctgcccatgtacccttatgataaaagaacactactctgtagactccaatgtcccacagtatccctggtctcttgaccctttctttccaaattacccagattctgcagttttagcatctgtgtggcctgtctcctgggttcccgtgggtcctggagctgaacaacaaatgtttggtagaggtggatctcctttttttgcaactgacagccagaagtgatttcttcagagaatagatagtggctgcacttctggactttatcattatccgagttcttgtacctagaggagaaaggttggaaggaagaggaacagtggggccaatctgggtactgcagatatccagagcctagcctcatctcccctcaaccgacttatgacttaccccaggagaaaacagtggggtacctgggagacttgctaccctctctcttggtctctgatccaacccacctcttcttcatcccctccccctcgtcccttctcataccaataatgcagagtgaggttggtaggctggggctcagagctgctgttccaagtgcaattcatgtactcgacattgaacacaaaacactgaacctctgggaggggcagagtggaaacactgagggagtcagtgggcatagtggtcaggaagaaatctagattggggagaaaatgaaggcagggagggaaagagaaatgatggtcagaaggaggaggccaagcacggtggctcatgtctgtaatcctggtgctttgaaaggctgaggcaggaggatcactagaggccaggagtttgagaccagcctaggcaacatagtgagaccctgcctcaaaagaaagaaagaaacaaacaaacaagaaagaaagaaagaagaagtagcgtgaggcagggaaccctcccccttgcccttcccactccacttttcaattctgcccacatgattgtaatggccagtggcaggcaccagatctctgtacggccccttcccacagccacccttctcaccagccccctccagtcccagatttcccaccagctgtggtgtcttcattcccattgggcgtcagaattgtcgtgttcagccccactcccagcaggggcagctgcaggaataagagggatgtgaatggtaatgatggcttcaacatggcgcttgctcttcattccctgggtgtagtctgtctgtgtcaggaacctgggtccctcacccactacccctccccacccacacgtttcctctgtcatagcttccggtggaaagaaccttataaaccagggctttacagagggtgtggcaaatatgtgctgtgtgacacgggctaagtcctctaggagattaggtgctgctgtaaggtggtaaacagaaactaaagctggatatacaatagtgtcacagactcaaaaatcctcagcccacctagatcctgggaaggatctgttcactgcggccgcatgttctttttttttttttttttttttttccagtcagttgcttaactgactggcattatattcgtc

SEQ ID NO: 711 - DNA, 251 bp, unidentified
  source 1..251: mol_type = other DNA
cacgtgtaatgccagtcagttaagcaactgactggtttctcgatcattattattttttggcgatcgcttttttttttttttttagcaaattggtaatactcctgcctccacagttttttttttttttttgcgatcgcctttttttttttttttttttttccagtcagttgcttaactgactggcattacacgtgttttttttttttttttttttcagctatataatgccagtcagttaagcaactgactgg

SEQ ID NO: 712 - DNA, 248 bp, unidentified
  source 1..248: mol_type = other DNA
ccagtcagttgcttaactgactggcattaagtatgaatttttttttttttttttatcatctaatgccagtcagttaagcaactgactggttttttttttttttttttttttggcgatcgcttttttttttttttttccttctcctctaaatcattaccttctataattttttttttttttttgcgatcgcctttttttttttttgatacatttccagtcagttgcttaactgactggcattagatgat

SEQ ID NO: 713 - DNA, 4714 bp, unidentified
  source 1..4714: mol_type = other DNA
ttcatacttaatgccagtcagttaagcaactgactggttttttttttttttttttttttgaacatgcggccgcgtgaacagatccttcccaggatctaggtgggctgaggatttttgagtctgtgacactattgtatatccagctttagtttctgtttaccaccttacagcagcacctaatctcctagaggacttagcccgtgtcacacagcacatatttgccacaccctctgtaaagccctggtttataaggttctttccaccggaagctatgacagaggaaacgtgtgggtggggaggggtagtgggtgagggacccaggttcctgacacagacagactacacccagggaatgaagagcaagcgccatgttgaagccatcattaccattcacatccctcttattcctgcagctgcccctgctgggagtggggctgaacacgacaattctgacgcccaatgggaatgaagacaccacagctggtgggaaatctgggactggagggggctggtgagaagggtggctgtgggaaggggccgtacagagatctggtgcctgccactggccattacaatcatgtgggcagaattgaaaagtggagtgggaagggcaagggggagggttccctgcctcacgctacttcttctttctttctttcttgtttgtttgtttctttctttcttttgaggcagggtctcactatgttgcctaggctggtctcaaactcctggcctctagtgatcctcctgcctcagcctttcaaagcaccaggattacagacatgagccaccgtgcttggcctcctccttctgaccatcatttctctttccctccctgccttcattttctccccaatctagatttcttcctgaccactatgcccactgactccctcagtgtttccactctgcccctcccagaggttcagtgttttgtgttcaatgtcgagtacatgaattgcacttggaacagcagctctgagccccagcctaccaacctcactctgcattattggtatgagaagggacgagggggaggggatgaagaagaggtgggttggatcagagaccaagagagagggtagcaagtctcccaggtaccccactgttttctcctggggtaagtcataagtcggttgaggggagatgaggctaggctctggatatctgcagtacccagattggccccactgttcctcttccttccaacctttctcctctaggtacaagaactcggataatgataaagtccagaagtgcagccactatctattctctgaagaaatcacttctggctgtcagttgcaaaaaaaggagatccacctctaccaaacatttgttgttcagctccaggacccacgggaacccaggagacaggccacacagatgctaaaactgcagaatctgggtaatttggaaagaaagggtcaagagaccagggatactgtgggacattggagtctacagagtagtgttcttttatcataagggtacatgggcagaaaagaggaggtaggggatcatgatgggaagggaggaggtattaggggcactaccttcaggatcctgacttgtctaggccaggggaatgaccacatatgcacacatatctccagtgatcccctgggctccagagaacctaacacttcacaaactgagtgaatcccagctagaactgaactggaacaacagattcttgaaccactgtttggagcacttggtgcagtaccggactgactgggaccacagctggactgtgagtgactagggacgtgaatgtagcagctaaggccaagaaagtagggctaaaggattcaaccagacagatagaaggacctaatatcaagctcctgttctctgcctcccagcttctctgctcaccccctaccctccctcctccaactcctttcccccctattttctccagtgagttttctttttttcttttcttttctttctttctttcttttttttttttttttgagacagagcctcactctgttgcccaggcttgagtgcagtggggcgatcttgggctcactgcgacctctgtctccctggttcaagtgattctcctgcttcagcctcccaagtagctgggagcatgcacaaccatgcctggctaatttttgtatttttagtaaagacagggttttgccatgttggtcaggctggtcttgaactcctgacctcaggtgatctgcccacctcggcctcccaaagtgctgggattacaggcgtgagccaccattcctgacaccagtgagttttcattagggattccctacccatactcttcctgataccagatagacaagtaaacaaaaggaagccattaaggggatccagaggggaggcattagattcaagtcagtgaagggagcagtgtggcttgagtagtcaagagatgagagagaaactgggcagtagcagagatgacactggtgggtgttcaggagtatgttttaattctcccttctctcatagacacccactttccctcatcctctttctcctcaaggaacaatcagtggattatagacataagttctccttgcctagtgtggatgggcagaaacgctacacgtttcgtgttcggagccgctttaacccactctgtggaagtgctcagcattggagtgaatggagccacccaatccactgggggagcaatacttcaaaaggtaaaatgggcccacatgacccaatccatgagcccaacaccccagcctttctaacaccactgtcttttgctccacttccctgtcactaaagcccctaaacttggtgccccatctctccacactgtctaaccccaacctctagaaatcaaggtttttctgtgtagggttgggttagcgtgttgttagagtaggggagtggattgagaaggaggctgaggggtactcaagggggctatagaatgtataggatttccctgaagcattcctagagagcctgcaaggtgaagatggctttggaaccagctggatctaggctgtgccacatactacctctttggccttggccacatccctaaactcttggattctgtttcctaagatgtaagatggaggtaattgttcctgcctcacaggagctgttgtgaggattaaacagagagtatgtctttagcgcggtgcctggcaccagtgcctggcatgtagtaggggcacaacaaatataaggtccactttgcttttcttttttctatagagaatcctttcctgtttgcattggaagccgtggttatctctgttggctccatgggattgattatcagccttctctgtgtgtatttctggctggaacggtgagatttggagaagcccagaaaaatgaggggaacggtagctgacaatagcagaggagggttttgcagggtctttaggagtaaaggatgagacagtaagtaatgagagattacccaagagggtttggtgatggaaggaagccacaggcacagagaacacagaatcactttatttcatatgggacaactgggagaagggtgataaaaaagctttaacctatgtgctcctgctccctctttctcccctgtcaggacgatgccccgaattcccaccctgaagaacctagaggatcttgttactgaataccacgggaacttttcggtgagaacgctgtcataagcatgctgcagtctatcaactgccaactgcctgccagcaagacagacagagtgtgggggtgggggcagagaggagagggaaggaggccctgcactaactgtcaggatgtggccgaccaaatggggcatggactatacagagagagacacacacagaagtgcagattatagattgaatgaggcagatggcaactggtattgggggcccaggagcctgtgtatcccttctgtaatcaattacagtggttgcagacatcatgagtactcctttggcacagagctcggtcttttacttcctgcccctaattgacccctgacctggacatatctgtctttaggcctggagtggtgtgtctaagggactggctgagagtctgcagccagactacagtgaacgactctgcctcgtcagtgagattcccccaaaaggaggggcccttggggaggggcctggggcctccccatgcaaccagcatagcccctactgggcccccccatgttacaccctaaagcctgaaacctgaaccccaatcctctgacagaagaaccccagggtcctgtagccctaagtggtactaactttccttcattcaacccacctgcgtctcatactcacctcaccccactgtggctgatttggaattttgtgcccccatgtaagcaccccttcatttggcattccccacttgagaattacccttttgccccgaacatgtttttcttctccctcagtctggcccttccttttcgcaggattcttcctccctccctctttccctcccttcctctttccatctaccctccgattgttcctgaaccgatgagaaataaagtttctgttgataatcatcaaaaatgtctgtcatgggggtggggagcaggggaagcctgggatgcaatgagggtgggaggggaagaaaaaggagtagtacattcatgctgtggaggcatctaaaaaaataaaaaaaataaaaaaagcattattgactgatgcatgtaacctttttttttttttttttttttttccagtcagttgcttaactgactggcattatatagctg

SEQ ID NO: 714 - DNA, 242 bp, unidentified
  source 1..242: mol_type = other DNA
taatgccagtcagttaagcaactgactgggtagtgtatttttttttttttttttatcatcccagtcagttgcttaactgactggcattattttttttttttttttttttttgcgaccttttttttttttttttgctagaaagagtactgttctggaaactgacttttttttttttttttggtcgctttttttttttttgatacattttaatgccagtcagttaagcaactgactgggatgat

SEQ ID NO: 715 - DNA, 244 bp, unidentified
  source 1..244: mol_type = other DNA
cacgtgccagtcagttgcttaactgactggcattatttctcgatcattattattttttgcgaccttttttttttttttttgttgagaatggtgctagtggtagtgaacagtttttttttttttttggtcgcttttttttttttttttttttttaatgccagtcagttaagcaactgactggcacgtgttttttttttttttttttttgacgaataccagtcagttgcttaactgactggcatta

SEQ ID NO: 716 - DNA, 4715 bp, unidentified; identical to SEQ ID NO: 704
  source 1..4715: mol_type = other DNA

SEQ ID NO: 717 - DNA, 245 bp, unidentified
  source 1..245: mol_type = other DNA
cacgtgccagtcagttgcttaactgactggcattatttctcgatcattattattttttgcgaccttttttttttttttttagcaaattggtaatactcctgcctccacagttttttttttttttttggtcgcttttttttttttttttttttttaatgccagtcagttaagcaactgactggcacgtgttttttttttttttttttttcagctataccagtcagttgcttaactgactggcatta

SEQ ID NO: 718 - DNA, 242 bp, unidentified
  source 1..242: mol_type = other DNA
taatgccagtcagttaagcaactgactggagtatgaatttttttttttttttttatcatcccagtcagttgcttaactgactggcattattttttttttttttttttttttgcgaccttttttttttttttttccttctcctctaaatcattaccttctataattttttttttttttttggtcgctttttttttttttgatacattttaatgccagtcagttaagcaactgactgggatgat

SEQ ID NO: 719 - DNA, 4714 bp, unidentified; identical to SEQ ID NO: 707
  source 1..4714: mol_type = other DNA

SEQ ID NO: 720 - DNA, 242 bp, unidentified
  source 1..242: mol_type = other DNA
ccagtcagttgcttaactgactggcattagtagtgtatttttttttttttttttatcatctaatgccagtcagttaagcaactgactggttttttttttttttttttttttgcgaccttttttttttttttttgctagaaagagtactgttctggaaactgacttttttttttttttttggtcgctttttttttttttgatacatttccagtcagttgcttaactgactggcattagatgat

SEQ ID NO: 721 - DNA, 245 bp, unidentified
  source 1..245: mol_type = other DNA
cacgtgtaatgccagtcagttaagcaactgactggtttctcgatcattattattttttgcgaccttttttttttttttttgttgagaatggtgctagtggtagtgaacagttttttttttttttttggtcgctttttttttttttttttttttccagtcagttgcttaactgactggcattacacgtgttttttttttttttttttttgacgaatataatgccagtcagttaagcaactgactgg

SEQ ID NO: 722 - DNA, 4715 bp, unidentified; identical to SEQ ID NO: 710
  source 1..4715: mol_type = other DNA

SEQ ID NO: 723 - DNA, 245 bp, unidentified
  source 1..245: mol_type = other DNA
cacgtgtaatgccagtcagttaagcaactgactggtttctcgatcattattattttttgcgaccttttttttttttttttagcaaattggtaatactcctgcctccacagttttttttttttttttggtcgctttttttttttttttttttttccagtcagttgcttaactgactggcattacacgtgttttttttttttttttttttcagctatataatgccagtcagttaagcaactgactgg

SEQ ID NO: 724 - DNA, 242 bp, unidentified
  source 1..242: mol_type = other DNA
ccagtcagttgcttaactgactggcattaagtatgaatttttttttttttttttatcatctaatgccagtcagttaagcaactgactggttttttttttttttttttttttgcgaccttttttttttttttttccttctcctctaaatcattaccttctataattttttttttttttttggtcgctttttttttttttgatacatttccagtcagttgcttaactgactggcattagatgat

SEQ ID NO: 725 - DNA, 4714 bp, unidentified; identical to SEQ ID NO: 713
  source 1..4714: mol_type = other DNA

SEQ ID NO: 726 - DNA, 254 bp, unidentified
  source 1..254: mol_type = other DNA
taatgccagtcagttaagcaactgactgggtagtgtatttttttttttttttttatcatcccagtcagttgcttaactgactggcattattttttttttttttttttttttgcggcgatcggcttttttttttttttttgctagaaagagtactgttctggaaactgacttttttttttttttttgccgatcgccgctttttttttttttgatacattttaatgccagtcagttaagcaactgactgggatgat

SEQ ID NO: 727 - DNA, 257 bp, unidentified
  source 1..257: mol_type = other DNA
cacgtgccagtcagttgcttaactgactggcattatttctcgatcattattattttttgcggcgatcggcttttttttttttttttgttgagaatggtgctagtggtagtgaacagttttttttttttttttgccgatcgccgcttttttttttttttttttttttaatgccagtcagttaagcaactgactggcacgtgttttttttttttttttttttgacgaataccagtcagttgcttaactgactggcatta

SEQ ID NO: 728 - DNA, 4715 bp, unidentified; identical to SEQ ID NO: 704
  source 1..4715: mol_type = other DNA

SEQ ID NO: 729 - DNA, 257 bp, unidentified
  source 1..257: mol_type = other DNA
cacgtgccagtcagttgcttaactgactggcattatttctcgatcattattattttttgcggcgatcggcttttttttttttttttagcaaattggtaatactcctgcctccacagttttttttttttttttgccgatcgccgcttttttttttttttttttttttaatgccagtcagttaagcaactgactggcacgtgttttttttttttttttttttcagctataccagtcagttgcttaactgactggcatta

SEQ ID NO: 730 - DNA, 254 bp, unidentified
  source 1..254: mol_type = other DNA
taatgccagtcagttaagcaactgactggagtatgaatttttttttttttttttatcatcccagtcagttgcttaactgactggcattattttttttttttttttttttttgcggcgatcggcttttttttttttttttccttctcctctaaatcattaccttctataattttttttttttttttgccgatcgccgctttttttttttttgatacattttaatgccagtcagttaagcaactgactgggatgat

SEQ ID NO: 731 - DNA, 4714 bp, unidentified; identical to SEQ ID NO: 707
  source 1..4714: mol_type = other DNA

SEQ ID NO: 732 - DNA, 254 bp, unidentified
  source 1..254: mol_type = other DNA
ccagtcagttgcttaactgactggcattagtagtgtatttttttttttttttttatcatctaatgccagtcagttaagcaactgactggttttttttttttttttttttttgcggcgatcggcttttttttttttttttgctagaaagagtactgttctggaaactgacttttttttttttttttgccgatcgccgctttttttttttttgatacatttccagtcagttgcttaactgactggcattagatgat

SEQ ID NO: 733 - DNA, 257 bp, unidentified
  source 1..257: mol_type = other DNA
cacgtgtaatgccagtcagttaagcaactgactggtttctcgatcattattattttttgcggcgatcggcttttttttttttttttgttgagaatggtgctagtggtagtgaacagttttttttttttttttgccgatcgccgctttttttttttttttttttttccagtcagttgcttaactgactggcattacacgtgttttttttttttttttttttgacgaatataatgccagtcagttaagcaactgactgg

SEQ ID NO: 734 - DNA, 4715 bp, unidentified; identical to SEQ ID NO: 710
  source 1..4715: mol_type = other DNA

SEQ ID NO: 735 - DNA, 257 bp, unidentified
  source 1..257: mol_type = other DNA
cacgtgtaatgccagtcagttaagcaactgactggtttctcgatcattattattttttgcggcgatcggcttttttttttttttttagcaaattggtaatactcctgcctccacagttttttttttttttttgccgatcgccgctttttttttttttttttttttccagtcagttgcttaactgactggcattacacgtgttttttttttttttttttttcagctatataatgccagtcagttaagcaactgactgg

SEQ ID NO: 736 - DNA, 254 bp, unidentified
  source 1..254: mol_type = other DNA
ccagtcagttgcttaactgactggcattaagtatgaatttttttttttttttttatcatctaatgccagtcagttaagcaactgactggttttttttttttttttttttttgcggcgatcggcttttttttttttttttccttctcctctaaatcattaccttctataattttttttttttttttgccgatcgccgctttttttttttttgatacatttccagtcagttgcttaactgactggcattagatgat

SEQ ID NO: 737 - DNA, 4714 bp, unidentified; identical to SEQ ID NO: 713
  source 1..4714: mol_type = other DNA

SEQ ID NO: 738 - DNA, 311 bp, unidentified
  source 1..311: mol_type = other DNA
ggggtttggggagcaacggaaccaaaaaccaacgtaaggcttagctagaggtagtgtatttttttttttttttttatcatcctctagctaagccttacgttggtttttggttccgttgctccccaaaccccttttttttttttttttttttttggcgatcgcttttttttttttttttgctagaaagagtactgttctggaaactgacttttttttttttttttgcgatcgcctttttttttttttgatacatttggggtttggggagcaacggaaccaaaaaccaacgtaaggcttagctagaggatgat

SEQ ID NO: 739 - DNA, 314 bp, unidentified
  source 1..314: mol_type = other DNA
cacgtgctctagctaagccttacgttggtttttggttccgttgctccccaaacccctttctcgatcattattattttttggcgatcgcttttttttttttttttgttgagaatggtgctagtggtagtgaacagttttttttttttttttgcgatcgcctttttttttttttttttttttggggtttggggagcaacggaaccaaaaaccaacgtaaggcttagctagagcacgtgttttttttttttttttttttgacgaatactctagctaagccttacgttggtttttggttccgttgctccccaaacccc

SEQ ID NO: 740 - DNA, 4757 bp, unidentified
  source 1..4757: mol_type = other DNA
tacactacctctagctaagccttacgttggtttttggttccgttgctccccaaaccccttttttttttttttttttttttggttacatgcatcagtcaataatgctttttttattttttttatttttttagatgcctccacagcatgaatgtactactcctttttcttcccctcccaccctcattgcatcccaggcttcccctgctccccacccccatgacagacatttttgatgattatcaacagaaactttatttctcatcggttcaggaacaatcggagggtagatggaaagaggaagggagggaaagagggagggaggaagaatcctgcgaaaaggaagggccagactgagggagaagaaaaacatgttcggggcaaaagggtaattctcaagtggggaatgccaaatgaaggggtgcttacatgggggcacaaaattccaaatcagccacagtggggtgaggtgagtatgagacgcaggtgggttgaatgaaggaaagttagtaccacttagggctacaggaccctggggttcttctgtcagaggattggggttcaggtttcaggctttagggtgtaacatgggggggcccagtaggggctatgctggttgcatggggaggccccaggcccctccccaagggcccctccttttgggggaatctcactgacgaggcagagtcgttcactgtagtctggctgcagactctcagccagtcccttagacacaccactccaggcctaaagacagatatgtccaggtcaggggtcaattaggggcaggaagtaaaagaccgagctctgtgccaaaggagtactcatgatgtctgcaaccactgtaattgattacagaagggatacacaggctcctgggcccccaataccagttgccatctgcctcattcaatctataatctgcacttctgtgtgtgtctctctctgtatagtccatgccccatttggtcggccacatcctgacagttagtgcagggcctccttccctctcctctctgcccccacccccacactctgtctgtcttgctggcaggcagttggcagttgatagactgcagcatgcttatgacagcgttctcaccgaaaagttcccgtggtattcagtaacaagatcctctaggttcttcagggtgggaattcggggcatcgtcctgacaggggagaaagagggagcaggagcacataggttaaagcttttttatcacccttctcccagttgtcccatatgaaataaagtgattctgtgttctctgtgcctgtggcttccttccatcaccaaaccctcttgggtaatctctcattacttactgtctcatcctttactcctaaagaccctgcaaaaccctcctctgctattgtcagctaccgttcccctcatttttctgggcttctccaaatctcaccgttccagccagaaatacacacagagaaggctgataatcaatcccatggagccaacagagataaccacggcttccaatgcaaacaggaaaggattctctatagaaaaaagaaaagcaaagtggaccttatatttgttgtgcccctactacatgccaggcactggtgccaggcaccgcgctaaagacatactctctgtttaatcctcacaacagctcctgtgaggcaggaacaattacctccatcttacatcttaggaaacagaatccaagagtttagggatgtggccaaggccaaagaggtagtatgtggcacagcctagatccagctggttccaaagccatcttcaccttgcaggctctctaggaatgcttcagggaaatcctatacattctatagcccccttgagtacccctcagcctccttctcaatccactcccctactctaacaacacgctaacccaaccctacacagaaaaaccttgatttctagaggttggggttagacagtgtggagagatggggcaccaagtttaggggctttagtgacagggaagtggagcaaaagacagtggtgttagaaaggctggggtgttgggctcatggattgggtcatgtgggcccattttaccttttgaagtattgctcccccagtggattgggtggctccattcactccaatgctgagcacttccacagagtgggttaaagcggctccgaacacgaaacgtgtagcgtttctgcccatccacactaggcaaggagaacttatgtctataatccactgattgttccttgaggagaaagaggatgagggaaagtgggtgtctatgagagaagggagaattaaaacatactcctgaacacccaccagtgtcatctctgctactgcccagtttctctctcatctcttgactactcaagccacactgctcccttcactgacttgaatctaatgcctcccctctggatccccttaatggcttccttttgtttacttgtctatctggtatcaggaagagtatgggtagggaatccctaatgaaaactcactggtgtcaggaatggtggctcacgcctgtaatcccagcactttgggaggccgaggtgggcagatcacctgaggtcaggagttcaagaccagcctgaccaacatggcaaaaccctgtctttactaaaaatacaaaaattagccaggcatggttgtgcatgctcccagctacttgggaggctgaagcaggagaatcacttgaaccagggagacagaggtcgcagtgagcccaagatcgccccactgcactcaagcctgggcaacagagtgaggctctgtctcaaaaaaaaaaaaaaaagaaagaaagaaagaaaagaaaagaaaaaaagaaaactcactggagaaaataggggggaaaggagttggaggagggagggtagggggtgagcagagaagctgggaggcagagaacaggagcttgatattaggtccttctatctgtctggttgaatcctttagccctactttcttggccttagctgctacattcacgtccctagtcactcacagtccagctgtggtcccagtcagtccggtactgcaccaagtgctccaaacagtggttcaagaatctgttgttccagttcagttctagctgggattcactcagtttgtgaagtgttaggttctctggagcccaggggatcactggagatatgtgtgcatatgtggtcattcccctggcctagacaagtcaggatcctgaaggtagtgcccctaatacctcctcccttcccatcatgatcccctacctcctcttttctgcccatgtacccttatgataaaagaacactactctgtagactccaatgtcccacagtatccctggtctcttgaccctttctttccaaattacccagattctgcagttttagcatctgtgtggcctgtctcctgggttcccgtgggtcctggagctgaacaacaaatgtttggtagaggtggatctcctttttttgcaactgacagccagaagtgatttcttcagagaatagatagtggctgcacttctggactttatcattatccgagttcttgtacctagaggagaaaggttggaaggaagaggaacagtggggccaatctgggtactgcagatatccagagcctagcctcatctcccctcaaccgacttatgacttaccccaggagaaaacagtggggtacctgggagacttgctaccctctctcttggtctctgatccaacccacctcttcttcatcccctccccctcgtcccttctcataccaataatgcagagtgaggttggtaggctggggctcagagctgctgttccaagtgcaattcatgtactcgacattgaacacaaaacactgaacctctgggaggggcagagtggaaacactgagggagtcagtgggcatagtggtcaggaagaaatctagattggggagaaaatgaaggcagggagggaaagagaaatgatggtcagaaggaggaggccaagcacggtggctcatgtctgtaatcctggtgctttgaaaggctgaggcaggaggatcactagaggccaggagtttgagaccagcctaggcaacatagtgagaccctgcctcaaaagaaagaaagaaacaaacaaacaagaaagaaagaaagaagaagtagcgtgaggcagggaaccctcccccttgcccttcccactccacttttcaattctgcccacatgattgtaatggccagtggcaggcaccagatctctgtacggccccttcccacagccacccttctcaccagccccctccagtcccagatttcccaccagctgtggtgtcttcattcccattgggcgtcagaattgtcgtgttcagccccactcccagcaggggcagctgcaggaataagagggatgtgaatggtaatgatggcttcaacatggcgcttgctcttcattccctgggtgtagtctgtctgtgtcaggaacctgggtccctcacccactacccctccccacccacacgtttcctctgtcatagcttccggtggaaagaaccttataaaccagggctttacagagggtgtggcaaatatgtgctgtgtgacacgggctaagtcctctaggagattaggtgctgctgtaaggtggtaaacagaaactaaagctggatatacaatagtgtcacagactcaaaaatcctcagcccacctagatcctgggaaggatctgttcactgcggccgcatgttctttttttttttttttttttttttggggtttggggagcaacggaaccaaaaaccaacgtaaggcttagctagagtattcgtc

SEQ ID NO: 741 - DNA, 314 bp, unidentified
  source 1..314: mol_type = other DNA
cacgtgctctagctaagccttacgttggtttttggttccgttgctccccaaacccctttctcgatcattattattttttggcgatcgcttttttttttttttttagcaaattggtaatactcctgcctccacagttttttttttttttttgcgatcgcctttttttttttttttttttttggggtttggggagcaacggaaccaaaaaccaacgtaaggcttagctagagcacgtgttttttttttttttttttttcagctatactctagctaagccttacgttggtttttggttccgttgctccccaaacccc

SEQ ID NO: 742 - DNA, 311 bp, unidentified
  source 1..311: mol_type = other DNA
ggggtttggggagcaacggaaccaaaaaccaacgtaaggcttagctagagagtatgaatttttttttttttttttatcatcctctagctaagccttacgttggtttttggttccgttgctccccaaaccccttttttttttttttttttttttggcgatcgcttttttttttttttttccttctcctctaaatcattaccttctataattttttttttttttttgcgatcgcctttttttttttttgatacatttggggtttggggagcaacggaaccaaaaaccaacgtaaggcttagctagaggatgat

SEQ ID NO: 743 - DNA, 4756 bp, unidentified
  source 1..4756: mol_type = other DNA
ttcatactctctagctaagccttacgttggtttttggttccgttgctccccaaaccccttttttttttttttttttttttgaacatgcggccgcgtgaacagatccttcccaggatctaggtgggctgaggatttttgagtctgtgacactattgtatatccagctttagtttctgtttaccaccttacagcagcacctaatctcctagaggacttagcccgtgtcacacagcacatatttgccacaccctctgtaaagccctggtttataaggttctttccaccggaagctatgacagaggaaacgtgtgggtggggaggggtagtgggtgagggacccaggttcctgacacagacagactacacccagggaatgaagagcaagcgccatgttgaagccatcattaccattcacatccctcttattcctgcagctgcccctgctgggagtggggctgaacacgacaattctgacgcccaatgggaatgaagacaccacagctggtgggaaatctgggactggagggggctggtgagaagggtggctgtgggaaggggccgtacagagatctggtgcctgccactggccattacaatcatgtgggcagaattgaaaagtggagtgggaagggcaagggggagggttccctgcctcacgctacttcttctttctttctttcttgtttgtttgtttctttctttcttttgaggcagggtctcactatgttgcctaggctggtctcaaactcctggcctctagtgatcctcctgcctcagcctttcaaagcaccaggattacagacatgagccaccgtgcttggcctcctccttctgaccatcatttctctttccctccctgccttcattttctccccaatctagatttcttcctgaccactatgcccactgactccctcagtgtttccactctgcccctcccagaggttcagtgttttgtgttcaatgtcgagtacatgaattgcacttggaacagcagctctgagccccagcctaccaacctcactctgcattattggtatgagaagggacgagggggaggggatgaagaagaggtgggttggatcagagaccaagagagagggtagcaagtctcccaggtaccccactgttttctcctggggtaagtcataagtcggttgaggggagatgaggctaggctctggatatctgcagtacccagattggccccactgttcctcttccttccaacctttctcctctaggtacaagaactcggataatgataaagtccagaagtgcagccactatctattctctgaagaaatcacttctggctgtcagttgcaaaaaaaggagatccacctctaccaaacatttgttgttcagctccaggacccacgggaacccaggagacaggccacacagatgctaaaactgcagaatctgggtaatttggaaagaaagggtcaagagaccagggatactgtgggacattggagtctacagagtagtgttcttttatcataagggtacatgggcagaaaagaggaggtaggggatcatgatgggaagggaggaggtattaggggcactaccttcaggatcctgacttgtctaggccaggggaatgaccacatatgcacacatatctccagtgatcccctgggctccagagaacctaacacttcacaaactgagtgaatcccagctagaactgaactggaacaacagattcttgaaccactgtttggagcacttggtgcagtaccggactgactgggaccacagctggactgtgagtgactagggacgtgaatgtagcagctaaggccaagaaagtagggctaaaggattcaaccagacagatagaaggacctaatatcaagctcctgttctctgcctcccagcttctctgctcaccccctaccctccctcctccaactcctttcccccctattttctccagtgagttttctttttttcttttcttttctttctttctttcttttttttttttttttgagacagagcctcactctgttgcccaggcttgagtgcagtggggcgatcttgggctcactgcgacctctgtctccctggttcaagtgattctcctgcttcagcctcccaagtagctgggagcatgcacaaccatgcctggctaatttttgtatttttagtaaagacagggttttgccatgttggtcaggctggtcttgaactcctgacctcaggtgatctgcccacctcggcctcccaaagtgctgggattacaggcgtgagccaccattcctgacaccagtgagttttcattagggattccctacccatactcttcctgataccagatagacaagtaaacaaaaggaagccattaaggggatccagaggggaggcattagattcaagtcagtgaagggagcagtgtggcttgagtagtcaagagatgagagagaaactgggcagtagcagagatgacactggtgggtgttcaggagtatgttttaattctcccttctctcatagacacccactttccctcatcctctttctcctcaaggaacaatcagtggattatagacataagttctccttgcctagtgtggatgggcagaaacgctacacgtttcgtgttcggagccgctttaacccactctgtggaagtgctcagcattggagtgaatggagccacccaatccactgggggagcaatacttcaaaaggtaaaatgggcccacatgacccaatccatgagcccaacaccccagcctttctaacaccactgtcttttgctccacttccctgtcactaaagcccctaaacttggtgccccatctctccacactgtctaaccccaacctctagaaatcaaggtttttctgtgtagggttgggttagcgtgttgttagagtaggggagtggattgagaaggaggctgaggggtactcaagggggctatagaatgtataggatttccctgaagcattcctagagagcctgcaaggtgaagatggctttggaaccagctggatctaggctgtgccacatactacctctttggccttggccacatccctaaactcttggattctgtttcctaagatgtaagatggaggtaattgttcctgcctcacaggagctgttgtgaggattaaacagagagtatgtctttagcgcggtgcctggcaccagtgcctggcatgtagtaggggcacaacaaatataaggtccactttgcttttcttttttctatagagaatcctttcctgtttgcattggaagccgtggttatctctgttggctccatgggattgattatcagccttctctgtgtgtatttctggctggaacggtgagatttggagaagcccagaaaaatgaggggaacggtagctgacaatagcagaggagggttttgcagggtctttaggagtaaaggatgagacagtaagtaatgagagattacccaagagggtttggtgatggaaggaagccacaggcacagagaacacagaatcactttatttcatatgggacaactgggagaagggtgataaaaaagctttaacctatgtgctcctgctccctctttctcccctgtcaggacgatgccccgaattcccaccctgaagaacctagaggatcttgttactgaataccacgggaacttttcggtgagaacgctgtcataagcatgctgcagtctatcaactgccaactgcctgccagcaagacagacagagtgtgggggtgggggcagagaggagagggaaggaggccctgcactaactgtcaggatgtggccgaccaaatggggcatggactatacagagagagacacacacagaagtgcagattatagattgaatgaggcagatggcaactggtattgggggcccaggagcctgtgtatcccttctgtaatcaattacagtggttgcagacatcatgagtactcctttggcacagagctcggtcttttacttcctgcccctaattgacccctgacctggacatatctgtctttaggcctggagtggtgtgtctaagggactggctgagagtctgcagccagactacagtgaacgactctgcctcgtcagtgagattcccccaaaaggaggggcccttggggaggggcctggggcctccccatgcaaccagcatagcccctactgggcccccccatgttacaccctaaagcctgaaacctgaaccccaatcctctgacagaagaaccccagggtcctgtagccctaagtggtactaactttccttcattcaacccacctgcgtctcatactcacctcaccccactgtggctgatttggaattttgtgcccccatgtaagcaccccttcatttggcattccccacttgagaattacccttttgccccgaacatgtttttcttctccctcagtctggcccttccttttcgcaggattcttcctccctccctctttccctcccttcctctttccatctaccctccgattgttcctgaaccgatgagaaataaagtttctgttgataatcatcaaaaatgtctgtcatgggggtggggagcaggggaagcctgggatgcaatgagggtgggaggggaagaaaaaggagtagtacattcatgctgtggaggcatctaaaaaaataaaaaaaataaaaaaagcattattgactgatgcatgtaacctttttttttttttttttttttttggggtttggggagcaacggaaccaaaaaccaacgtaaggcttagctagagtatagctg

SEQ ID NO: 744 - DNA, 311 bp, unidentified
  source 1..311: mol_type = other DNA
ctctagctaagccttacgttggtttttggttccgttgctccccaaaccccgtagtgtatttttttttttttttttatcatcggggtttggggagcaacggaaccaaaaaccaacgtaaggcttagctagagttttttttttttttttttttttggcgatcgcttttttttttttttttgctagaaagagtactgttctggaaactgacttttttttttttttttgcgatcgcctttttttttttttgatacatttctctagctaagccttacgttggtttttggttccgttgctccccaaaccccgatgat

SEQ ID NO: 745 - DNA, 314 bp, unidentified
  source 1..314: mol_type = other DNA
cacgtgggggtttggggagcaacggaaccaaaaaccaacgtaaggcttagctagagtttctcgatcattattattttttggcgatcgcttttttttttttttttgttgagaatggtgctagtggtagtgaacagttttttttttttttttgcgatcgcctttttttttttttttttttttctctagctaagccttacgttggtttttggttccgttgctccccaaacccccacgtgttttttttttttttttttttgacgaataggggtttggggagcaacggaaccaaaaaccaacgtaaggcttagctagag

SEQ ID NO: 746 - DNA, 4757 bp, unidentified
  source 1..4757: mol_type = other DNA
tacactacggggtttggggagcaacggaaccaaaaaccaacgtaaggcttagctagagttttttttttttttttttttttggttacatgcatcagtcaataatgctttttttattttttttatttttttagatgcctccacagcatgaatgtactactcctttttcttcccctcccaccctcattgcatcccaggcttcccctgctccccacccccatgacagacatttttgatgattatcaacagaaactttatttctcatcggttcaggaacaatcggagggtagatggaaagaggaagggagggaaagagggagggaggaagaatcctgcgaaaaggaagggccagactgagggagaagaaaaacatgttcggggcaaaagggtaattctcaagtggggaatgccaaatgaaggggtgcttacatgggggcacaaaattccaaatcagccacagtggggtgaggtgagtatgagacgcaggtgggttgaatgaaggaaagttagtaccacttagggctacaggaccctggggttcttctgtcagaggattggggttcaggtttcaggctttagggtgtaacatgggggggcccagtaggggctatgctggttgcatggggaggccccaggcccctccccaagggcccctccttttgggggaatctcactgacgaggcagagtcgttcactgtagtctggctgcagactctcagccagtcccttagacacaccactccaggcctaaagacagatatgtccaggtcaggggtcaattaggggcaggaagtaaaagaccgagctctgtgccaaaggagtactcatgatgtctgcaaccactgtaattgattacagaagggatacacaggctcctgggcccccaataccagttgccatctgcctcattcaatctataatctgcacttctgtgtgtgtctctctctgtatagtccatgccccatttggtcggccacatcctgacagttagtgcagggcctccttccctctcctctctgcccccacccccacactctgtctgtcttgctggcaggcagttggcagttgatagactgcagcatgcttatgacagcgttctcaccgaaaagttcccgtggtattcagtaacaagatcctctaggttcttcagggtgggaattcggggcatcgtcctgacaggggagaaagagggagcaggagcacataggttaaagcttttttatcacccttctcccagttgtcccatatgaaataaagtgattctgtgttctctgtgcctgtggcttccttccatcaccaaaccctcttgggtaatctctcattacttactgtctcatcctttactcctaaagaccctgcaaaaccctcctctgctattgtcagctaccgttcccctcatttttctgggcttctccaaatctcaccgttccagccagaaatacacacagagaaggctgataatcaatcccatggagccaacagagataaccacggcttccaatgcaaacaggaaaggattctctatagaaaaaagaaaagcaaagtggaccttatatttgttgtgcccctactacatgccaggcactggtgccaggcaccgcgctaaagacatactctctgtttaatcctcacaacagctcctgtgaggcaggaacaattacctccatcttacatcttaggaaacagaatccaagagtttagggatgtggccaaggccaaagaggtagtatgtggcacagcctagatccagctggttccaaagccatcttcaccttgcaggctctctaggaatgcttcagggaaatcctatacattctatagcccccttgagtacccctcagcctccttctcaatccactcccctactctaacaacacgctaacccaaccctacacagaaaaaccttgatttctagaggttggggttagacagtgtggagagatggggcaccaagtttaggggctttagtgacagggaagtggagcaaaagacagtggtgttagaaaggctggggtgttgggctcatggattgggtcatgtgggcccattttaccttttgaagtattgctcccccagtggattgggtggctccattcactccaatgctgagcacttccacagagtgggttaaagcggctccgaacacgaaacgtgtagcgtttctgcccatccacactaggcaaggagaacttatgtctataatccactgattgttccttgaggagaaagaggatgagggaaagtgggtgtctatgagagaagggagaattaaaacatactcctgaacacccaccagtgtcatctctgctactgcccagtttctctctcatctcttgactactcaagccacactgctcccttcactgacttgaatctaatgcctcccctctggatccccttaatggcttccttttgtttacttgtctatctggtatcaggaagagtatgggtagggaatccctaatgaaaactcactggtgtcaggaatggtggctcacgcctgtaatcccagcactttgggaggccgaggtgggcagatcacctgaggtcaggagttcaagaccagcctgaccaacatggcaaaaccctgtctttactaaaaatacaaaaattagccaggcatggttgtgcatgctcccagctacttgggaggctgaagcaggagaatcacttgaaccagggagacagaggtcgcagtgagcccaagatcgccccactgcactcaagcctgggcaacagagtgaggctctgtctcaaaaaaaaaaaaaaaagaaagaaagaaagaaaagaaaagaaaaaaagaaaactcactggagaaaataggggggaaaggagttggaggagggagggtagggggtgagcagagaagctgggaggcagagaacaggagcttgatattaggtccttctatctgtctggttgaatcctttagccctactttcttggccttagctgctacattcacgtccctagtcactcacagtccagctgtggtcccagtcagtccggtactgcaccaagtgctccaaacagtggttcaagaatctgttgttccagttcagttctagctgggattcactcagtttgtgaagtgttaggttctctggagcccaggggatcactggagatatgtgtgcatatgtggtcattcccctggcctagacaagtcaggatcctgaaggtagtgcccctaatacctcctcccttcccatcatgatcccctacctcctcttttctgcccatgtacccttatgataaaagaacactactctgtagactccaatgtcccacagtatccctggtctcttgaccctttctttccaaattacccagattctgcagttttagcatctgtgtggcctgtctcctgggttcccgtgggtcctggagctgaacaacaaatgtttggtagaggtggatctcctttttttgcaactgacagccagaagtgatttcttcagagaatagatagtggctgcacttctggactttatcattatccgagttcttgtacctagaggagaaaggttggaaggaagaggaacagtggggccaatctgggtactgcagatatccagagcctagcctcatctcccctcaaccgacttatgacttaccccaggagaaaacagtggggtacctgggagacttgctaccctctctcttggtctctgatccaacccacctcttcttcatcccctccccctcgtcccttctcataccaataatgcagagtgaggttggtaggctggggctcagagctgctgttccaagtgcaattcatgtactcgacattgaacacaaaacactgaacctctgggaggggcagagtggaaacactgagggagtcagtgggcatagtggtcaggaagaaatctagattggggagaaaatgaaggcagggagggaaagagaaatgatggtcagaaggaggaggccaagcacggtggctcatgtctgtaatcctggtgctttgaaaggctgaggcaggaggatcactagaggccaggagtttgagaccagcctaggcaacatagtgagaccctgcctcaaaagaaagaaagaaacaaacaaacaagaaagaaagaaagaagaagtagcgtgaggcagggaaccctcccccttgcccttcccactccacttttcaattctgcccacatgattgtaatggccagtggcaggcaccagatctctgtacggccccttcccacagccacccttctcaccagccccctccagtcccagatttcccaccagctgtggtgtcttcattcccattgggcgtcagaattgtcgtgttcagccccactcccagcaggggcagctgcaggaataagagggatgtgaatggtaatgatggcttcaacatggcgcttgctcttcattccctgggtgtagtctgtctgtgtcaggaacctgggtccctcacccactacccctccccacccacacgtttcctctgtcatagcttccggtggaaagaaccttataaaccagggctttacagagggtgtggcaaatatgtgctgtgtgacacgggctaagtcctctaggagattaggtgctgctgtaaggtggtaaacagaaactaaagctggatatacaatagtgtcacagactcaaaaatcctcagcccacctagatcctgggaaggatctgttcactgcggccgcatgttctttttttttttttttttttttttctctagctaagccttacgttggtttttggttccgttgctccccaaacccctattcgtc

SEQ ID NO: 747 - DNA, 314 bp, unidentified
  source 1..314: mol_type = other DNA
cacgtgggggtttggggagcaacggaaccaaaaaccaacgtaaggcttagctagagtttctcgatcattattattttttggcgatcgcttttttttttttttttagcaaattggtaatactcctgcctccacagttttttttttttttttgcgatcgcctttttttttttttttttttttctctagctaagccttacgttggtttttggttccgttgctccccaaacccccacgtgttttttttttttttttttttcagctataggggtttggggagcaacggaaccaaaaaccaacgtaaggcttagctagag

SEQ ID NO: 748 - DNA, 311 bp, unidentified
  source 1..311: mol_type = other DNA
ctctagctaagccttacgttggtttttggttccgttgctccccaaaccccagtatgaatttttttttttttttttatcatcggggtttggggagcaacggaaccaaaaaccaacgtaaggcttagctagagttttttttttttttttttttttggcgatcgcttttttttttttttttccttctcctctaaatcattaccttctataattttttttttttttttgcgatcgcctttttttttttttgatacatttctctagctaagccttacgttggtttttggttccgttgctccccaaaccccgatgat

SEQ ID NO: 749 - DNA, 4756 bp, unidentified
  source 1..4756: mol_type = other DNA
ttcatactggggtttggggagcaacggaaccaaaaaccaacgtaaggcttagctagagttttttttttttttttttttttgaacatgcggccgcgtgaacagatccttcccaggatctaggtgggctgaggatttttgagtctgtgacactattgtatatccagctttagtttctgtttaccaccttacagcagcacctaatctcctagaggacttagcccgtgtcacacagcacatatttgccacaccctctgtaaagccctggtttataaggttctttccaccggaagctatgacagaggaaacgtgtgggtggggaggggtagtgggtgagggacccaggttcctgacacagacagactacacccagggaatgaagagcaagcgccatgttgaagccatcattaccattcacatccctcttattcctgcagctgcccctgctgggagtggggctgaacacgacaattctgacgcccaatgggaatgaagacaccacagctggtgggaaatctgggactggagggggctggtgagaagggtggctgtgggaaggggccgtacagagatctggtgcctgccactggccattacaatcatgtgggcagaattgaaaagtggagtgggaagggcaagggggagggttccctgcctcacgctacttcttctttctttctttcttgtttgtttgtttctttctttcttttgaggcagggtctcactatgttgcctaggctggtctcaaactcctggcctctagtgatcctcctgcctcagcctttcaaagcaccaggattacagacatgagccaccgtgcttggcctcctccttctgaccatcatttctctttccctccctgccttcattttctccccaatctagatttcttcctgaccactatgcccactgactccctcagtgtttccactctgcccctcccagaggttcagtgttttgtgttcaatgtcgagtacatgaattgcacttggaacagcagctctgagccccagcctaccaacctcactctgcattattggtatgagaagggacgagggggaggggatgaagaagaggtgggttggatcagagaccaagagagagggtagcaagtctcccaggtaccccactgttttctcctggggtaagtcataagtcggttgaggggagatgaggctaggctctggatatctgcagtacccagattggccccactgttcctcttccttccaacctttctcctctaggtacaagaactcggataatgataaagtccagaagtgcagccactatctattctctgaagaaatcacttctggctgtcagttgcaaaaaaaggagatccacctctaccaaacatttgttgttcagctccaggacccacgggaacccaggagacaggccacacagatgctaaaactgcagaatctgggtaatttggaaagaaagggtcaagagaccagggatactgtgggacattggagtctacagagtagtgttcttttatcataagggtacatgggcagaaaagaggaggtaggggatcatgatgggaagggaggaggtattaggggcactaccttcaggatcctgacttgtctaggccaggggaatgaccacatatgcacacatatctccagtgatcccctgggctccagagaacctaacacttcacaaactgagtgaatcccagctagaactgaactggaacaacagattcttgaaccactgtttggagcacttggtgcagtaccggactgactgggaccacagctggactgtgagtgactagggacgtgaatgtagcagctaaggccaagaaagtagggctaaaggattcaaccagacagatagaaggacctaatatcaagctcctgttctctgcctcccagcttctctgctcaccccctaccctccctcctccaactcctttcccccctattttctccagtgagttttctttttttcttttcttttctttctttctttcttttttttttttttttgagacagagcctcactctgttgcccaggcttgagtgcagtggggcgatcttgggctcactgcgacctctgtctccctggttcaagtgattctcctgcttcagcctcccaagtagctgggagcatgcacaaccatgcctggctaatttttgtatttttagtaaagacagggttttgccatgttggtcaggctggtcttgaactcctgacctcaggtgatctgcccacctcggcctcccaaagtgctgggattacaggcgtgagccaccattcctgacaccagtgagttttcattagggattccctacccatactcttcctgataccagatagacaagtaaacaaaaggaagccattaaggggatccagaggggaggcattagattcaagtcagtgaagggagcagtgtggcttgagtagtcaagagatgagagagaaactgggcagtagcagagatgacactggtgggtgttcaggagtatgttttaattctcccttctctcatagacacccactttccctcatcctctttctcctcaaggaacaatcagtggattatagacataagttctccttgcctagtgtggatgggcagaaacgctacacgtttcgtgttcggagccgctttaacccactctgtggaagtgctcagcattggagtgaatggagccacccaatccactgggggagcaatacttcaaaaggtaaaatgggcccacatgacccaatccatgagcccaacaccccagcctttctaacaccactgtcttttgctccacttccctgtcactaaagcccctaaacttggtgccccatctctccacactgtctaaccccaacctctagaaatcaaggtttttctgtgtagggttgggttagcgtgttgttagagtaggggagtggattgagaaggaggctgaggggtactcaagggggctatagaatgtataggatttccctgaagcattcctagagagcctgcaaggtgaagatggctttggaaccagctggatctaggctgtgccacatactacctctttggccttggccacatccctaaactcttggattctgtttcctaagatgtaagatggaggtaattgttcctgcctcacaggagctgttgtgaggattaaacagagagtatgtctttagcgcggtgcctggcaccagtgcctggcatgtagtaggggcacaacaaatataaggtccactttgcttttcttttttctatagagaatcctttcctgtttgcattggaagccgtggttatctctgttggctccatgggattgattatcagccttctctgtgtgtatttctggctggaacggtgagatttggagaagcccagaaaaatgaggggaacggtagctgacaatagcagaggagggttttgcagggtctttaggagtaaaggatgagacagtaagtaatgagagattacccaagagggtttggtgatggaaggaagccacaggcacagagaacacagaatcactttatttcatatgggacaactgggagaagggtgataaaaaagctttaacctatgtgctcctgctccctctttctcccctgtcaggacgatgccccgaattcccaccctgaagaacctagaggatcttgttactgaataccacgggaacttttcggtgagaacgctgtcataagcatgctgcagtctatcaactgccaactgcctgccagcaagacagacagagtgtgggggtgggggcagagaggagagggaaggaggccctgcactaactgtcaggatgtggccgaccaaatggggcatggactatacagagagagacacacacagaagtgcagattatagattgaatgaggcagatggcaactggtattgggggcccaggagcctgtgtatcccttctgtaatcaattacagtggttgcagacatcatgagtactcctttggcacagagctcggtcttttacttcctgcccctaattgacccctgacctggacatatctgtctttaggcctggagtggtgtgtctaagggactggctgagagtctgcagccagactacagtgaacgactctgcctcgtcagtgagattcccccaaaaggaggggcccttggggaggggcctggggcctccccatgcaaccagcatagcccctactgggcccccccatgttacaccctaaagcctgaaacctgaaccccaatcctctgacagaagaaccccagggtcctgtagccctaagtggtactaactttccttcattcaacccacctgcgtctcatactcacctcaccccactgtggctgatttggaattttgtgcccccatgtaagcaccccttcatttggcattccccacttgagaattacccttttgccccgaacatgtttttcttctccctcagtctggcccttccttttcgcaggattcttcctccctccctctttccctcccttcctctttccatctaccctccgattgttcctgaaccgatgagaaataaagtttctgttgataatcatcaaaaatgtctgtcatgggggtggggagcaggggaagcctgggatgcaatgagggtgggaggggaagaaaaaggagtagtacattcatgctgtggaggcatctaaaaaaataaaaaaaataaaaaaagcattattgactgatgcatgtaacctttttttttttttttttttttttctctagctaagccttacgttggtttttggttccgttgctccccaaacccctatagctg

SEQ ID NO: 750 - DNA, 305 bp, unidentified
  source 1..305: mol_type = other DNA
ggggtttggggagcaacggaaccaaaaaccaacgtaaggcttagctagaggtagtgtatttttttttttttttttatcatcctctagctaagccttacgttggtttttggttccgttgctccccaaaccccttttttttttttttttttttttgcgaccttttttttttttttttgctagaaagagtactgttctggaaactgacttttttttttttttttggtcgctttttttttttttgatacatttggggtttggggagcaacggaaccaaaaaccaacgtaaggcttagctagaggatgat

SEQ ID NO: 751 - DNA, 307 bp, unidentified
  source 1..307: mol_type = other DNA
cacgtgctctagctaagccttacgttggtttttggttccgttgctccccaaacccctttctcgatcattattattttttgcgaccttttttttttttttttgttgagaatggtgctagtggtagtgaacagtttttttttttttttggtcgctttttttttttttttttttttggggtttggggagcaacggaaccaaaaaccaacgtaaggcttagctagagcacgtgttttttttttttttttttttgacgaatactctagctaagccttacgttggtttttggttccgttgctccccaaacccc

SEQ ID NO: 752 - DNA, 4757 bp, unidentified; identical to SEQ ID NO: 740
  source 1..4757: mol_type = other DNA

SEQ ID NO: 753 - DNA, 308 bp, unidentified
  source 1..308: mol_type = other DNA
cacgtgctctagctaagccttacgttggtttttggttccgttgctccccaaacccctttctcgatcattattattttttgcgaccttttttttttttttttagcaaattggtaatactcctgcctccacagttttttttttttttttggtcgctttttttttttttttttttttggggtttggggagcaacggaaccaaaaaccaacgtaaggcttagctagagcacgtgttttttttttttttttttttcagctatactctagctaagccttacgttggtttttggttccgttgctccccaaacccc

SEQ ID NO: 754 - DNA, 305 bp, unidentified
  source 1..305: mol_type = other DNA
ggggtttggggagcaacggaaccaaaaaccaacgtaaggcttagctagagagtatgaatttttttttttttttttatcatcctctagctaagccttacgttggtttttggttccgttgctccccaaaccccttttttttttttttttttttttgcgaccttttttttttttttttccttctcctctaaatcattaccttctataattttttttttttttttggtcgctttttttttttttgatacatttggggtttggggagcaacggaaccaaaaaccaacgtaaggcttagctagaggatgat

SEQ ID NO: 755 - DNA, 4756 bp, unidentified; identical to SEQ ID NO: 743
  source 1..4756: mol_type = other DNA

SEQ ID NO: 756 - DNA, 305 bp, unidentified
  source 1..305: mol_type = other DNA
ctctagctaagccttacgttggtttttggttccgttgctccccaaaccccgtagtgtatttttttttttttttttatcatcggggtttggggagcaacggaaccaaaaaccaacgtaaggcttagctagagttttttttttttttttttttttgcgaccttttttttttttttttgctagaaagagtactgttctggaaactgacttttttttttttttttggtcgctttttttttttttgatacatttctctagctaagccttacgttggtttttggttccgttgctccccaaaccccgatgat

SEQ ID NO: 757 - DNA, 308 bp, unidentified
  source 1..308: mol_type = other DNA
cacgtgggggtttggggagcaacggaaccaaaaaccaacgtaaggcttagctagagtttctcgatcattattattttttgcgaccttttttttttttttttgttgagaatggtgctagtggtagtgaacagttttttttttttttttggtcgctttttttttttttttttttttctctagctaagccttacgttggtttttggttccgttgctccccaaacccccacgtgttttttttttttttttttttgacgaataggggtttggggagcaacggaaccaaaaaccaacgtaaggcttagctagag

SEQ ID NO: 758 - DNA, 4757 bp, unidentified; identical to SEQ ID NO: 746
  source 1..4757: mol_type = other DNA

SEQ ID NO: 759 - DNA, 308 bp, unidentified
  source 1..308: mol_type = other DNA
cacgtgggggtttggggagcaacggaaccaaaaaccaacgtaaggcttagctagagtttctcgatcattattattttttgcgaccttttttttttttttttagcaaattggtaatactcctgcctccacagttttttttttttttttggtcgctttttttttttttttttttttctctagctaagccttacgttggtttttggttccgttgctccccaaacccccacgtgttttttttttttttttttttcagctataggggtttggggagcaacggaaccaaaaaccaacgtaaggcttagctagag

SEQ ID NO: 760 - DNA, 305 bp, unidentified
  source 1..305: mol_type = other DNA
ctctagctaagccttacgttggtttttggttccgttgctccccaaaccccagtatgaatttttttttttttttttatcatcggggtttggggagcaacggaaccaaaaaccaacgtaaggcttagctagagttttttttttttttttttttttgcgaccttttttttttttttttccttctcctctaaatcattaccttctataattttttttttttttttggtcgctttttttttttttgatacatttctctagctaagccttacgttggtttttggttccgttgctccccaaaccccgatgat

SEQ ID NO: 761 - DNA, 4756 bp, unidentified; identical to SEQ ID NO: 749
  source 1..4756: mol_type = other DNA

SEQ ID NO: 762 - DNA, 317 bp, unidentified
  source 1..317: mol_type = other DNA
ggggtttggggagcaacggaaccaaaaaccaacgtaaggcttagctagaggtagtgtatttttttttttttttttatcatcctctagctaagccttacgttggtttttggttccgttgctccccaaaccccttttttttttttttttttttttgcggcgatcggcttttttttttttttttgctagaaagagtactgttctggaaactgacttttttttttttttttgccgatcgccgctttttttttttttgatacatttggggtttggggagcaacggaaccaaaaaccaacgtaaggcttagctagaggatgat

SEQ ID NO: 763 - DNA, 320 bp, unidentified
  source 1..320: mol_type = other DNA
cacgtgctctagctaagccttacgttggtttttggttccgttgctccccaaacccctttctcgatcattattattttttgcggcgatcggcttttttttttttttttgttgagaatggtgctagtggtagtgaacagttttttttttttttttgccgatcgccgctttttttttttttttttttttggggtttggggagcaacggaaccaaaaaccaacgtaaggcttagctagagcacgtgttttttttttttttttttttgacgaatactctagctaagccttacgttggtttttggttccgttgctccccaaacccc

SEQ ID NO: 764 - DNA, 4757 bp, unidentified; identical to SEQ ID NO: 740
  source 1..4757: mol_type = other DNA

SEQ ID NO: 765 - DNA, 320 bp, unidentified
  source 1..320: mol_type = other DNA
cacgtgctctagctaagccttacgttggtttttggttccgttgctccccaaacccctttctcgatcattattattttttgcggcgatcggcttttttttttttttttagcaaattggtaatactcctgcctccacagttttttttttttttttgccgatcgccgctttttttttttttttttttttggggtttggggagcaacggaaccaaaaaccaacgtaaggcttagctagagcacgtgttttttttttttttttttttcagctatactctagctaagccttacgttggtttttggttccgttgctccccaaacccc

SEQ ID NO: 766 - DNA, 317 bp, unidentified
  source 1..317: mol_type = other DNA
ggggtttggggagcaacggaaccaaaaaccaacgtaaggcttagctagagagtatgaatttttttttttttttttatcatcctctagctaagccttacgttggtttttggttccgttgctccccaaaccccttttttttttttttttttttttgcggcgatcggcttttttttttttttttccttctcctctaaatcattaccttctataattttttttttttttttgccgatcgccgctttttttttttttgatacatttggggtttggggagcaacggaaccaaaaaccaacgtaaggcttagctagaggatgat

SEQ ID NO: 767 - DNA, 4756 bp, unidentified; identical to SEQ ID NO: 743
  source 1..4756: mol_type = other DNA

SEQ ID NO: 768 - DNA, 317 bp, unidentified
  source 1..317: mol_type = other DNA
ctctagctaagccttacgttggtttttggttccgttgctccccaaaccccgtagtgtatttttttttttttttttatcatcggggtttggggagcaacggaaccaaaaaccaacgtaaggcttagctagagttttttttttttttttttttttgcggcgatcggcttttttttttttttttgctagaaagagtactgttctggaaactgacttttttttttttttttgccgatcgccgctttttttttttttgatacatttctctagctaagccttacgttggtttttggttccgttgctccccaaaccccgatgat

SEQ ID NO: 769 - DNA, 320 bp, unidentified
  source 1..320: mol_type = other DNA
cacgtgggggtttggggagcaacggaaccaaaaaccaacgtaaggcttagctagagtttctcgatcattattattttttgcggcgatcggcttttttttttttttttgttgagaatggtgctagtggtagtgaacagttttttttttttttttgccgatcgccgctttttttttttttttttttttctctagctaagccttacgttggtttttggttccgttgctccccaaacccccacgtgttttttttttttttttttttgacgaataggggtttggggagcaacggaaccaaaaaccaacgtaaggcttagctagag

SEQ ID NO: 770 - DNA, 4757 bp, unidentified; identical to SEQ ID NO: 746
  source 1..4757: mol_type = other DNA

SEQ ID NO: 771 - DNA, 320 bp, unidentified
  source 1..320: mol_type = other DNA
cacgtgggggtttggggagcaacggaaccaaaaaccaacgtaaggcttagctagagtttctcgatcattattattttttgcggcgatcggcttttttttttttttttagcaaattggtaatactcctgcctccacagttttttttttttttttgccgatcgccgctttttttttttttttttttttctctagctaagccttacgttggtttttggttccgttgctccccaaacccccacgtgttttttttttttttttttttcagctataggggtttggggagcaacggaaccaaaaaccaacgtaaggcttagctagag

SEQ ID NO: 772 - DNA, 317 bp, unidentified
  source 1..317: mol_type = other DNA
ctctagctaagccttacgttggtttttggttccgttgctccccaaaccccagtatgaatttttttttttttttttatcatcggggtttggggagcaacggaaccaaaaaccaacgtaaggcttagctagagttttttttttttttttttttttgcggcgatcggcttttttttttttttttccttctcctctaaatcattaccttctataattttttttttttttttgccgatcgccgctttttttttttttgatacatttctctagctaagccttacgttggtttttggttccgttgctccccaaaccccgatgat

SEQ ID NO: 773 - DNA, 4756 bp, unidentified; identical to SEQ ID NO: 749
  source 1..4756: mol_type = other DNA

SEQ ID NO: 774 - DNA, 311 bp, unidentified
  source 1..311: mol_type = other DNA
ggggtttggggagcaacggaacagaaagtgcacttaagcccagcgcctgcgtagtgtatttttttttttttttttatcatcgcaggcgctgggcttaagtgcactttctgttccgttgctccccaaaccccttttttttttttttttttttttggcgatcgcttttttttttttttttgctagaaagagtactgttctggaaactgacttttttttttttttttgcgatcgcctttttttttttttgatacatttggggtttggggagcaacggaacagaaagtgcacttaagcccagcgcctgcgatgat

SEQ ID NO: 775 - DNA, 314 bp, unidentified
  source 1..314: mol_type = other DNA
cacgtggcaggcgctgggcttaagtgcactttctgttccgttgctccccaaacccctttctcgatcattattattttttggcgatcgcttttttttttttttttgttgagaatggtgctagtggtagtgaacagttttttttttttttttgcgatcgcctttttttttttttttttttttggggtttggggagcaacggaacagaaagtgcacttaagcccagcgcctgccacgtgttttttttttttttttttttgacgaatagcaggcgctgggcttaagtgcactttctgttccgttgctccccaaacccc

SEQ ID NO: 776 - DNA, 4757 bp, unidentified
  source 1..4757: mol_type = other DNA
tacactacgcaggcgctgggcttaagtgcactttctgttccgttgctccccaaaccccttttttttttttttttttttttggttacatgcatcagtcaataatgctttttttattttttttatttttttagatgcctccacagcatgaatgtactactcctttttcttcccctcccaccctcattgcatcccaggcttcccctgctccccacccccatgacagacatttttgatgattatcaacagaaactttatttctcatcggttcaggaacaatcggagggtagatggaaagaggaagggagggaaagagggagggaggaagaatcctgcgaaaaggaagggccagactgagggagaagaaaaacatgttcggggcaaaagggtaattctcaagtggggaatgccaaatgaaggggtgcttacatgggggcacaaaattccaaatcagccacagtggggtgaggtgagtatgagacgcaggtgggttgaatgaaggaaagttagtaccacttagggctacaggaccctggggttcttctgtcagaggattggggttcaggtttcaggctttagggtgtaacatgggggggcccagtaggggctatgctggttgcatggggaggccccaggcccctccccaagggcccctccttttgggggaatctcactgacgaggcagagtcgttcactgtagtctggctgcagactctcagccagtcccttagacacaccactccaggcctaaagacagatatgtccaggtcaggggtcaattaggggcaggaagtaaaagaccgagctctgtgccaaaggagtactcatgatgtctgcaaccactgtaattgattacagaagggatacacaggctcctgggcccccaataccagttgccatctgcctcattcaatctataatctgcacttctgtgtgtgtctctctctgtatagtccatgccccatttggtcggccacatcctgacagttagtgcagggcctccttccctctcctctctgcccccacccccacactctgtctgtcttgctggcaggcagttggcagttgatagactgcagcatgcttatgacagcgttctcaccgaaaagttcccgtggtattcagtaacaagatcctctaggttcttcagggtgggaattcggggcatcgtcctgacaggggagaaagagggagcaggagcacataggttaaagcttttttatcacccttctcccagttgtcccatatgaaataaagtgattctgtgttctctgtgcctgtggcttccttccatcaccaaaccctcttgggtaatctctcattacttactgtctcatcctttactcctaaagaccctgcaaaaccctcctctgctattgtcagctaccgttcccctcatttttctgggcttctccaaatctcaccgttccagccagaaatacacacagagaaggctgataatcaatcccatggagccaacagagataaccacggcttccaatgcaaacaggaaaggattctctatagaaaaaagaaaagcaaagtggaccttatatttgttgtgcccctactacatgccaggcactggtgccaggcaccgcgctaaagacatactctctgtttaatcctcacaacagctcctgtgaggcaggaacaattacctccatcttacatcttaggaaacagaatccaagagtttagggatgtggccaaggccaaagaggtagtatgtggcacagcctagatccagctggttccaaagccatcttcaccttgcaggctctctaggaatgcttcagggaaatcctatacattctatagcccccttgagtacccctcagcctccttctcaatccactcccctactctaacaacacgctaacccaaccctacacagaaaaaccttgatttctagaggttggggttagacagtgtggagagatggggcaccaagtttaggggctttagtgacagggaagtggagcaaaagacagtggtgttagaaaggctggggtgttgggctcatggattgggtcatgtgggcccattttaccttttgaagtattgctcccccagtggattgggtggctccattcactccaatgctgagcacttccacagagtgggttaaagcggctccgaacacgaaacgtgtagcgtttctgcccatccacactaggcaaggagaacttatgtctataatccactgattgttccttgaggagaaagaggatgagggaaagtgggtgtctatgagagaagggagaattaaaacatactcctgaacacccaccagtgtcatctctgctactgcccagtttctctctcatctcttgactactcaagccacactgctcccttcactgacttgaatctaatgcctcccctctggatccccttaatggcttccttttgtttacttgtctatctggtatcaggaagagtatgggtagggaatccctaatgaaaactcactggtgtcaggaatggtggctcacgcctgtaatcccagcactttgggaggccgaggtgggcagatcacctgaggtcaggagttcaagaccagcctgaccaacatggcaaaaccctgtctttactaaaaatacaaaaattagccaggcatggttgtgcatgctcccagctacttgggaggctgaagcaggagaatcacttgaaccagggagacagaggtcgcagtgagcccaagatcgccccactgcactcaagcctgggcaacagagtgaggctctgtctcaaaaaaaaaaaaaaaagaaagaaagaaagaaaagaaaagaaaaaaagaaaactcactggagaaaataggggggaaaggagttggaggagggagggtagggggtgagcagagaagctgggaggcagagaacaggagcttgatattaggtccttctatctgtctggttgaatcctttagccctactttcttggccttagctgctacattcacgtccctagtcactcacagtccagctgtggtcccagtcagtccggtactgcaccaagtgctccaaacagtggttcaagaatctgttgttccagttcagttctagctgggattcactcagtttgtgaagtgttaggttctctggagcccaggggatcactggagatatgtgtgcatatgtggtcattcccctggcctagacaagtcaggatcctgaaggtagtgcccctaatacctcctcccttcccatcatgatcccctacctcctcttttctgcccatgtacccttatgataaaagaacactactctgtagactccaatgtcccacagtatccctggtctcttgaccctttctttccaaattacccagattctgcagttttagcatctgtgtggcctgtctcctgggttcccgtgggtcctggagctgaacaacaaatgtttggtagaggtggatctcctttttttgcaactgacagccagaagtgatttcttcagagaatagatagtggctgcacttctggactttatcattatccgagttcttgtacctagaggagaaaggttggaaggaagaggaacagtggggccaatctgggtactgcagatatccagagcctagcctcatctcccctcaaccgacttatgacttaccccaggagaaaacagtggggtacctgggagacttgctaccctctctcttggtctctgatccaacccacctcttcttcatcccctccccctcgtcccttctcataccaataatgcagagtgaggttggtaggctggggctcagagctgctgttccaagtgcaattcatgtactcgacattgaacacaaaacactgaacctctgggaggggcagagtggaaacactgagggagtcagtgggcatagtggtcaggaagaaatctagattggggagaaaatgaaggcagggagggaaagagaaatgatggtcagaaggaggaggccaagcacggtggctcatgtctgtaatcctggtgctttgaaaggctgaggcaggaggatcactagaggccaggagtttgagaccagcctaggcaacatagtgagaccctgcctcaaaagaaagaaagaaacaaacaaacaagaaagaaagaaagaagaagtagcgtgaggcagggaaccctcccccttgcccttcccactccacttttcaattctgcccacatgattgtaatggccagtggcaggcaccagatctctgtacggccccttcccacagccacccttctcaccagccccctccagtcccagatttcccaccagctgtggtgtcttcattcccattgggcgtcagaattgtcgtgttcagccccactcccagcaggggcagctgcaggaataagagggatgtgaatggtaatgatggcttcaacatggcgcttgctcttcattccctgggtgtagtctgtctgtgtcaggaacctgggtccctcacccactacccctccccacccacacgtttcctctgtcatagcttccggtggaaagaaccttataaaccagggctttacagagggtgtggcaaatatgtgctgtgtgacacgggctaagtcctctaggagattaggtgctgctgtaaggtggtaaacagaaactaaagctggatatacaatagtgtcacagactcaaaaatcctcagcccacctagatcctgggaaggatctgttcactgcggccgcatgttctttttttttttttttttttttttggggtttggggagcaacggaacagaaagtgcacttaagcccagcgcctgctattcgtc

SEQ ID NO: 777 - DNA, 314 bp, unidentified
  source 1..314: mol_type = other DNA
cacgtggcaggcgctgggcttaagtgcactttctgttccgttgctccccaaacccctttctcgatcattattattttttggcgatcgcttttttttttttttttagcaaattggtaatactcctgcctccacagttttttttttttttttgcgatcgcctttttttttttttttttttttggggtttggggagcaacggaacagaaagtgcacttaagcccagcgcctgccacgtgttttttttttttttttttttcagctatagcaggcgctgggcttaagtgcactttctgttccgttgctccccaaacccc

SEQ ID NO: 778 - DNA, 311 bp, unidentified
  source 1..311: mol_type = other DNA
ggggtttggggagcaacggaacagaaagtgcacttaagcccagcgcctgcagtatgaatttttttttttttttttatcatcgcaggcgctgggcttaagtgcactttctgttccgttgctccccaaaccccttttttttttttttttttttttggcgatcgcttttttttttttttttccttctcctctaaatcattaccttctataattttttttttttttttgcgatcgcctttttttttttttgatacatttggggtttggggagcaacggaacagaaagtgcacttaagcccagcgcctgcgatgat

SEQ ID NO: 779 - DNA, 4756 bp, unidentified
  source 1..4756: mol_type = other DNA
ttcatactgcaggcgctgggcttaagtgcactttctgttccgttgctccccaaaccccttttttttttttttttttttttgaacatgcggccgcgtgaacagatccttcccaggatctaggtgggctgaggatttttgagtctgtgacactattgtatatccagctttagtttctgtttaccaccttacagcagcacctaatctcctagaggacttagcccgtgtcacacagcacatatttgccacaccctctgtaaagccctggtttataaggttctttccaccggaagctatgacagaggaaacgtgtgggtggggaggggtagtgggtgagggacccaggttcctgacacagacagactacacccagggaatgaagagcaagcgccatgttgaagccatcattaccattcacatccctcttattcctgcagctgcccctgctgggagtggggctgaacacgacaattctgacgcccaatgggaatgaagacaccacagctggtgggaaatctgggactggagggggctggtgagaagggtggctgtgggaaggggccgtacagagatctggtgcctgccactggccattacaatcatgtgggcagaattgaaaagtggagtgggaagggcaagggggagggttccctgcctcacgctacttcttctttctttctttcttgtttgtttgtttctttctttcttttgaggcagggtctcactatgttgcctaggctggtctcaaactcctggcctctagtgatcctcctgcctcagcctttcaaagcaccaggattacagacatgagccaccgtgcttggcctcctccttctgaccatcatttctctttccctccctgccttcattttctccccaatctagatttcttcctgaccactatgcccactgactccctcagtgtttccactctgcccctcccagaggttcagtgttttgtgttcaatgtcgagtacatgaattgcacttggaacagcagctctgagccccagcctaccaacctcactctgcattattggtatgagaagggacgagggggaggggatgaagaagaggtgggttggatcagagaccaagagagagggtagcaagtctcccaggtaccccactgttttctcctggggtaagtcataagtcggttgaggggagatgaggctaggctctggatatctgcagtacccagattggccccactgttcctcttccttccaacctttctcctctaggtacaagaactcggataatgataaagtccagaagtgcagccactatctattctctgaagaaatcacttctggctgtcagttgcaaaaaaaggagatccacctctaccaaacatttgttgttcagctccaggacccacgggaacccaggagacaggccacacagatgctaaaactgcagaatctgggtaatttggaaagaaagggtcaagagaccagggatactgtgggacattggagtctacagagtagtgttcttttatcataagggtacatgggcagaaaagaggaggtaggggatcatgatgggaagggaggaggtattaggggcactaccttcaggatcctgacttgtctaggccaggggaatgaccacatatgcacacatatctccagtgatcccctgggctccagagaacctaacacttcacaaactgagtgaatcccagctagaactgaactggaacaacagattcttgaaccactgtttggagcacttggtgcagtaccggactgactgggaccacagctggactgtgagtgactagggacgtgaatgtagcagctaaggccaagaaagtagggctaaaggattcaaccagacagatagaaggacctaatatcaagctcctgttctctgcctcccagcttctctgctcaccccctaccctccctcctccaactcctttcccccctattttctccagtgagttttctttttttcttttcttttctttctttctttcttttttttttttttttgagacagagcctcactctgttgcccaggcttgagtgcagtggggcgatcttgggctcactgcgacctctgtctccctggttcaagtgattctcctgcttcagcctcccaagtagctgggagcatgcacaaccatgcctggctaatttttgtatttttagtaaagacagggttttgccatgttggtcaggctggtcttgaactcctgacctcaggtgatctgcccacctcggcctcccaaagtgctgggattacaggcgtgagccaccattcctgacaccagtgagttttcattagggattccctacccatactcttcctgataccagatagacaagtaaacaaaaggaagccattaaggggatccagaggggaggcattagattcaagtcagtgaagggagcagtgtggcttgagtagtcaagagatgagagagaaactgggcagtagcagagatgacactggtgggtgttcaggagtatgttttaattctcccttctctcatagacacccactttccctcatcctctttctcctcaaggaacaatcagtggattatagacataagttctccttgcctagtgtggatgggcagaaacgctacacgtttcgtgttcggagccgctttaacccactctgtggaagtgctcagcattggagtgaatggagccacccaatccactgggggagcaatacttcaaaaggtaaaatgggcccacatgacccaatccatgagcccaacaccccagcctttctaacaccactgtcttttgctccacttccctgtcactaaagcccctaaacttggtgccccatctctccacactgtctaaccccaacctctagaaatcaaggtttttctgtgtagggttgggttagcgtgttgttagagtaggggagtggattgagaaggaggctgaggggtactcaagggggctatagaatgtataggatttccctgaagcattcctagagagcctgcaaggtgaagatggctttggaaccagctggatctaggctgtgccacatactacctctttggccttggccacatccctaaactcttggattctgtttcctaagatgtaagatggaggtaattgttcctgcctcacaggagctgttgtgaggattaaacagagagtatgtctttagcgcggtgcctggcaccagtgcctggcatgtagtaggggcacaacaaatataaggtccactttgcttttcttttttctatagagaatcctttcctgtttgcattggaagccgtggttatctctgttggctccatgggattgattatcagccttctctgtgtgtatttctggctggaacggtgagatttggagaagcccagaaaaatgaggggaacggtagctgacaatagcagaggagggttttgcagggtctttaggagtaaaggatgagacagtaagtaatgagagattacccaagagggtttggtgatggaaggaagccacaggcacagagaacacagaatcactttatttcatatgggacaactgggagaagggtgataaaaaagctttaacctatgtgctcctgctccctctttctcccctgtcaggacgatgccccgaattcccaccctgaagaacctagaggatcttgttactgaataccacgggaacttttcggtgagaacgctgtcataagcatgctgcagtctatcaactgccaactgcctgccagcaagacagacagagtgtgggggtgggggcagagaggagagggaaggaggccctgcactaactgtcaggatgtggccgaccaaatggggcatggactatacagagagagacacacacagaagtgcagattatagattgaatgaggcagatggcaactggtattgggggcccaggagcctgtgtatcccttctgtaatcaattacagtggttgcagacatcatgagtactcctttggcacagagctcggtcttttacttcctgcccctaattgacccctgacctggacatatctgtctttaggcctggagtggtgtgtctaagggactggctgagagtctgcagccagactacagtgaacgactctgcctcgtcagtgagattcccccaaaaggaggggcccttggggaggggcctggggcctccccatgcaaccagcatagcccctactgggcccccccatgttacaccctaaagcctgaaacctgaaccccaatcctctgacagaagaaccccagggtcctgtagccctaagtggtactaactttccttcattcaacccacctgcgtctcatactcacctcaccccactgtggctgatttggaattttgtgcccccatgtaagcaccccttcatttggcattccccacttgagaattacccttttgccccgaacatgtttttcttctccctcagtctggcccttccttttcgcaggattcttcctccctccctctttccctcccttcctctttccatctaccctccgattgttcctgaaccgatgagaaataaagtttctgttgataatcatcaaaaatgtctgtcatgggggtggggagcaggggaagcctgggatgcaatgagggtgggaggggaagaaaaaggagtagtacattcatgctgtggaggcatctaaaaaaataaaaaaaataaaaaaagcattattgactgatgcatgtaacctttttttttttttttttttttttggggtttggggagcaacggaacagaaagtgcacttaagcccagcgcctgctatagctg

SEQ ID NO: 780 - DNA, 311 bp, unidentified
  source 1..311: mol_type = other DNA
gcaggcgctgggcttaagtgcactttctgttccgttgctccccaaaccccgtagtgtatttttttttttttttttatcatcggggtttggggagcaacggaacagaaagtgcacttaagcccagcgcctgcttttttttttttttttttttttggcgatcgcttttttttttttttttgctagaaagagtactgttctggaaactgacttttttttttttttttgcgatcgcctttttttttttttgatacatttgcaggcgctgggcttaagtgcactttctgttccgttgctccccaaaccccgatgat

SEQ ID NO: 781 - DNA, 314 bp, unidentified
  source 1..314: mol_type = other DNA
cacgtgggggtttggggagcaacggaacagaaagtgcacttaagcccagcgcctgctttctcgatcattattattttttggcgatcgcttttttttttttttttgttgagaatggtgctagtggtagtgaacagttttttttttttttttgcgatcgcctttttttttttttttttttttgcaggcgctgggcttaagtgcactttctgttccgttgctccccaaacccccacgtgttttttttttttttttttttgacgaataggggtttggggagcaacggaacagaaagtgcacttaagcccagcgcctgc

SEQ ID NO: 782 - DNA, 4757 bp, unidentified
  source 1..4757: mol_type = other DNA
tacactacggggtttggggagcaacggaacagaaagtgcacttaagcccagcgcctgcttttttttttttttttttttttggttacatgcatcagtcaataatgctttttttattttttttatttttttagatgcctccacagcatgaatgtactactcctttttcttcccctcccaccctcattgcatcccaggcttcccctgctccccacccccatgacagacatttttgatgattatcaacagaaactttatttctcatcggttcaggaacaatcggagggtagatggaaagaggaagggagggaaagagggagggaggaagaatcctgcgaaaaggaagggccagactgagggagaagaaaaacatgttcggggcaaaagggtaattctcaagtggggaatgccaaatgaaggggtgcttacatgggggcacaaaattccaaatcagccacagtggggtgaggtgagtatgagacgcaggtgggttgaatgaaggaaagttagtaccacttagggctacaggaccctggggttcttctgtcagaggattggggttcaggtttcaggctttagggtgtaacatgggggggcccagtaggggctatgctggttgcatggggaggccccaggcccctccccaagggcccctccttttgggggaatctcactgacgaggcagagtcgttcactgtagtctggctgcagactctcagccagtcccttagacacaccactccaggcctaaagacagatatgtccaggtcaggggtcaattaggggcaggaagtaaaagaccgagctctgtgccaaaggagtactcatgatgtctgcaaccactgtaattgattacagaagggatacacaggctcctgggcccccaataccagttgccatctgcctcattcaatctataatctgcacttctgtgtgtgtctctctctgtatagtccatgccccatttggtcggccacatcctgacagttagtgcagggcctccttccctctcctctctgcccccacccccacactctgtctgtcttgctggcaggcagttggcagttgatagactgcagcatgcttatgacagcgttctcaccgaaaagttcccgtggtattcagtaacaagatcctctaggttcttcagggtgggaattcggggcatcgtcctgacaggggagaaagagggagcaggagcacataggttaaagcttttttatcacccttctcccagttgtcccatatgaaataaagtgattctgtgttctctgtgcctgtggcttccttccatcaccaaaccctcttgggtaatctctcattacttactgtctcatcctttactcctaaagaccctgcaaaaccctcctctgctattgtcagctaccgttcccctcatttttctgggcttctccaaatctcaccgttccagccagaaatacacacagagaaggctgataatcaatcccatggagccaacagagataaccacggcttccaatgcaaacaggaaaggattctctatagaaaaaagaaaagcaaagtggaccttatatttgttgtgcccctactacatgccaggcactggtgccaggcaccgcgctaaagacatactctctgtttaatcctcacaacagctcctgtgaggcaggaacaattacctccatcttacatcttaggaaacagaatccaagagtttagggatgtggccaaggccaaagaggtagtatgtggcacagcctagatccagctggttccaaagccatcttcaccttgcaggctctctaggaatgcttcagggaaatcctatacattctatagcccccttgagtacccctcagcctccttctcaatccactcccctactctaacaacacgctaacccaaccctacacagaaaaaccttgatttctagaggttggggttagacagtgtggagagatggggcaccaagtttaggggctttagtgacagggaagtggagcaaaagacagtggtgttagaaaggctggggtgttgggctcatggattgggtcatgtgggcccattttaccttttgaagtattgctcccccagtggattgggtggctccattcactccaatgctgagcacttccacagagtgggttaaagcggctccgaacacgaaacgtgtagcgtttctgcccatccacactaggcaaggagaacttatgtctataatccactgattgttccttgaggagaaagaggatgagggaaagtgggtgtctatgagagaagggagaattaaaacatactcctgaacacccaccagtgtcatctctgctactgcccagtttctctctcatctcttgactactcaagccacactgctcccttcactgacttgaatctaatgcctcccctctggatccccttaatggcttccttttgtttacttgtctatctggtatcaggaagagtatgggtagggaatccctaatgaaaactcactggtgtcaggaatggtggctcacgcctgtaatcccagcactttgggaggccgaggtgggcagatcacctgaggtcaggagttcaagaccagcctgaccaacatggcaaaaccctgtctttactaaaaatacaaaaattagccaggcatggttgtgcatgctcccagctacttgggaggctgaagcaggagaatcacttgaaccagggagacagaggtcgcagtgagcccaagatcgccccactgcactcaagcctgggcaacagagtgaggctctgtctcaaaaaaaaaaaaaaaagaaagaaagaaagaaaagaaaagaaaaaaagaaaactcactggagaaaataggggggaaaggagttggaggagggagggtagggggtgagcagagaagctgggaggcagagaacaggagcttgatattaggtccttctatctgtctggttgaatcctttagccctactttcttggccttagctgctacattcacgtccctagtcactcacagtccagctgtggtcccagtcagtccggtactgcaccaagtgctccaaacagtggttcaagaatctgttgttccagttcagttctagctgggattcactcagtttgtgaagtgttaggttctctggagcccaggggatcactggagatatgtgtgcatatgtggtcattcccctggcctagacaagtcaggatcctgaaggtagtgcccctaatacctcctcccttcccatcatgatcccctacctcctcttttctgcccatgtacccttatgataaaagaacactactctgtagactccaatgtcccacagtatccctggtctcttgaccctttctttccaaattacccagattctgcagttttagcatctgtgtggcctgtctcctgggttcccgtgggtcctggagctgaacaacaaatgtttggtagaggtggatctcctttttttgcaactgacagccagaagtgatttcttcagagaatagatagtggctgcacttctggactttatcattatccgagttcttgtacctagaggagaaaggttggaaggaagaggaacagtggggccaatctgggtactgcagatatccagagcctagcctcatctcccctcaaccgacttatgacttaccccaggagaaaacagtggggtacctgggagacttgctaccctctctcttggtctctgatccaacccacctcttcttcatcccctccccctcgtcccttctcataccaataatgcagagtgaggttggtaggctggggctcagagctgctgttccaagtgcaattcatgtactcgacattgaacacaaaacactgaacctctgggaggggcagagtggaaacactgagggagtcagtgggcatagtggtcaggaagaaatctagattggggagaaaatgaaggcagggagggaaagagaaatgatggtcagaaggaggaggccaagcacggtggctcatgtctgtaatcctggtgctttgaaaggctgaggcaggaggatcactagaggccaggagtttgagaccagcctaggcaacatagtgagaccctgcctcaaaagaaagaaagaaacaaacaaacaagaaagaaagaaagaagaagtagcgtgaggcagggaaccctcccccttgcccttcccactccacttttcaattctgcccacatgattgtaatggccagtggcaggcaccagatctctgtacggccccttcccacagccacccttctcaccagccccctccagtcccagatttcccaccagctgtggtgtcttcattcccattgggcgtcagaattgtcgtgttcagccccactcccagcaggggcagctgcaggaataagagggatgtgaatggtaatgatggcttcaacatggcgcttgctcttcattccctgggtgtagtctgtctgtgtcaggaacctgggtccctcacccactacccctccccacccacacgtttcctctgtcatagcttccggtggaaagaaccttataaaccagggctttacagagggtgtggcaaatatgtgctgtgtgacacgggctaagtcctctaggagattaggtgctgctgtaaggtggtaaacagaaactaaagctggatatacaatagtgtcacagactcaaaaatcctcagcccacctagatcctgggaaggatctgttcactgcggccgcatgttctttttttttttttttttttttttgcaggcgctgggcttaagtgcactttctgttccgttgctccccaaacccctattcgtc

SEQ ID NO: 783 - DNA, 314 bp, unidentified
  source 1..314: mol_type = other DNA
cacgtgggggtttggggagcaacggaacagaaagtgcacttaagcccagcgcctgctttctcgatcattattattttttggcgatcgcttttttttttttttttagcaaattggtaatactcctgcctccacagttttttttttttttttgcgatcgcctttttttttttttttttttttgcaggcgctgggcttaagtgcactttctgttccgttgctccccaaacccccacgtgttttttttttttttttttttcagctataggggtttggggagcaacggaacagaaagtgcacttaagcccagcgcctgc

SEQ ID NO: 784 - DNA, 311 bp, unidentified
  source 1..311: mol_type = other DNA
gcaggcgctgggcttaagtgcactttctgttccgttgctccccaaaccccagtatgaatttttttttttttttttatcatcggggtttggggagcaacggaacagaaagtgcacttaagcccagcgcctgcttttttttttttttttttttttggcgatcgcttttttttttttttttccttctcctctaaatcattaccttctataattttttttttttttttgcgatcgcctttttttttttttgatacatttgcaggcgctgggcttaagtgcactttctgttccgttgctccccaaaccccgatgat

SEQ ID NO: 785 - DNA, 4756 bp, unidentified
  source 1..4756: mol_type = other DNA
ttcatactggggtttggggagcaacggaacagaaagtgcacttaagcccagcgcctgcttttttttttttttttttttttgaacatgcggccgcgtgaacagatccttcccaggatctaggtgggctgaggatttttgagtctgtgacactattgtatatccagctttagtttctgtttaccaccttacagcagcacctaatctcctagaggacttagcccgtgtcacacagcacatatttgccacaccctctgtaaagccctggtttataaggttctttccaccggaagctatgacagaggaaacgtgtgggtggggaggggtagtgggtgagggacccaggttcctgacacagacagactacacccagggaatgaagagcaagcgccatgttgaagccatcattaccattcacatccctcttattcctgcagctgcccctgctgggagtggggctgaacacgacaattctgacgcccaatgggaatgaagacaccacagctggtgggaaatctgggactggagggggctggtgagaagggtggctgtgggaaggggccgtacagagatctggtgcctgccactggccattacaatcatgtgggcagaattgaaaagtggagtgggaagggcaagggggagggttccctgcctcacgctacttcttctttctttctttcttgtttgtttgtttctttctttcttttgaggcagggtctcactatgttgcctaggctggtctcaaactcctggcctctagtgatcctcctgcctcagcctttcaaagcaccaggattacagacatgagccaccgtgcttggcctcctccttctgaccatcatttctctttccctccctgccttcattttctccccaatctagatttcttcctgaccactatgcccactgactccctcagtgtttccactctgcccctcccagaggttcagtgttttgtgttcaatgtcgagtacatgaattgcacttggaacagcagctctgagccccagcctaccaacctcactctgcattattggtatgagaagggacgagggggaggggatgaagaagaggtgggttggatcagagaccaagagagagggtagcaagtctcccaggtaccccactgttttctcctggggtaagtcataagtcggttgaggggagatgaggctaggctctggatatctgcagtacccagattggccccactgttcctcttccttccaacctttctcctctaggtacaagaactcggataatgataaagtccagaagtgcagccactatctattctctgaagaaatcacttctggctgtcagttgcaaaaaaaggagatccacctctaccaaacatttgttgttcagctccaggacccacgggaacccaggagacaggccacacagatgctaaaactgcagaatctgggtaatttggaaagaaagggtcaagagaccagggatactgtgggacattggagtctacagagtagtgttcttttatcataagggtacatgggcagaaaagaggaggtaggggatcatgatgggaagggaggaggtattaggggcactaccttcaggatcctgacttgtctaggccaggggaatgaccacatatgcacacatatctccagtgatcccctgggctccagagaacctaacacttcacaaactgagtgaatcccagctagaactgaactggaacaacagattcttgaaccactgtttggagcacttggtgcagtaccggactgactgggaccacagctggactgtgagtgactagggacgtgaatgtagcagctaaggccaagaaagtagggctaaaggattcaaccagacagatagaaggacctaatatcaagctcctgttctctgcctcccagcttctctgctcaccccctaccctccctcctccaactcctttcccccctattttctccagtgagttttctttttttcttttcttttctttctttctttcttttttttttttttttgagacagagcctcactctgttgcccaggcttgagtgcagtggggcgatcttgggctcactgcgacctctgtctccctggttcaagtgattctcctgcttcagcctcccaagtagctgggagcatgcacaaccatgcctggctaatttttgtatttttagtaaagacagggttttgccatgttggtcaggctggtcttgaactcctgacctcaggtgatctgcccacctcggcctcccaaagtgctgggattacaggcgtgagccaccattcctgacaccagtgagttttcattagggattccctacccatactcttcctgataccagatagacaagtaaacaaaaggaagccattaaggggatccagaggggaggcattagattcaagtcagtgaagggagcagtgtggcttgagtagtcaagagatgagagagaaactgggcagtagcagagatgacactggtgggtgttcaggagtatgttttaattctcccttctctcatagacacccactttccctcatcctctttctcctcaaggaacaatcagtggattatagacataagttctccttgcctagtgtggatgggcagaaacgctacacgtttcgtgttcggagccgctttaacccactctgtggaagtgctcagcattggagtgaatggagccacccaatccactgggggagcaatacttcaaaaggtaaaatgggcccacatgacccaatccatgagcccaacaccccagcctttctaacaccactgtcttttgctccacttccctgtcactaaagcccctaaacttggtgccccatctctccacactgtctaaccccaacctctagaaatcaaggtttttctgtgtagggttgggttagcgtgttgttagagtaggggagtggattgagaaggaggctgaggggtactcaagggggctatagaatgtataggatttccctgaagcattcctagagagcctgcaaggtgaagatggctttggaaccagctggatctaggctgtgccacatactacctctttggccttggccacatccctaaactcttggattctgtttcctaagatgtaagatggaggtaattgttcctgcctcacaggagctgttgtgaggattaaacagagagtatgtctttagcgcggtgcctggcaccagtgcctggcatgtagtaggggcacaacaaatataaggtccactttgcttttcttttttctatagagaatcctttcctgtttgcattggaagccgtggttatctctgttggctccatgggattgattatcagccttctctgtgtgtatttctggctggaacggtgagatttggagaagcccagaaaaatgaggggaacggtagctgacaatagcagaggagggttttgcagggtctttaggagtaaaggatgagacagtaagtaatgagagattacccaagagggtttggtgatggaaggaagccacaggcacagagaacacagaatcactttatttcatatgggacaactgggagaagggtgataaaaaagctttaacctatgtgctcctgctccctctttctcccctgtcaggacgatgccccgaattcccaccctgaagaacctagaggatcttgttactgaataccacgggaacttttcggtgagaacgctgtcataagcatgctgcagtctatcaactgccaactgcctgccagcaagacagacagagtgtgggggtgggggcagagaggagagggaaggaggccctgcactaactgtcaggatgtggccgaccaaatggggcatggactatacagagagagacacacacagaagtgcagattatagattgaatgaggcagatggcaactggtattgggggcccaggagcctgtgtatcccttctgtaatcaattacagtggttgcagacatcatgagtactcctttggcacagagctcggtcttttacttcctgcccctaattgacccctgacctggacatatctgtctttaggcctggagtggtgtgtctaagggactggctgagagtctgcagccagactacagtgaacgactctgcctcgtcagtgagattcccccaaaaggaggggcccttggggaggggcctggggcctccccatgcaaccagcatagcccctactgggcccccccatgttacaccctaaagcctgaaacctgaaccccaatcctctgacagaagaaccccagggtcctgtagccctaagtggtactaactttccttcattcaacccacctgcgtctcatactcacctcaccccactgtggctgatttggaattttgtgcccccatgtaagcaccccttcatttggcattccccacttgagaattacccttttgccccgaacatgtttttcttctccctcagtctggcccttccttttcgcaggattcttcctccctccctctttccctcccttcctctttccatctaccctccgattgttcctgaaccgatgagaaataaagtttctgttgataatcatcaaaaatgtctgtcatgggggtggggagcaggggaagcctgggatgcaatgagggtgggaggggaagaaaaaggagtagtacattcatgctgtggaggcatctaaaaaaataaaaaaaataaaaaaagcattattgactgatgcatgtaacctttttttttttttttttttttttgcaggcgctgggcttaagtgcactttctgttccgttgctccccaaacccctatagctg

SEQ ID NO: 786 - DNA, 305 bp, unidentified
  source 1..305: mol_type = other DNA
ggggtttggggagcaacggaacagaaagtgcacttaagcccagcgcctgcgtagtgtatttttttttttttttttatcatcgcaggcgctgggcttaagtgcactttctgttccgttgctccccaaaccccttttttttttttttttttttttgcgaccttttttttttttttttgctagaaagagtactgttctggaaactgacttttttttttttttttggtcgctttttttttttttgatacatttggggtttggggagcaacggaacagaaagtgcacttaagcccagcgcctgcgatgat

SEQ ID NO: 787 - DNA, 307 bp, unidentified
  source 1..307: mol_type = other DNA
cacgtggcaggcgctgggcttaagtgcactttctgttccgttgctccccaaacccctttctcgatcattattattttttgcgaccttttttttttttttttgttgagaatggtgctagtggtagtgaacagtttttttttttttttggtcgctttttttttttttttttttttggggtttggggagcaacggaacagaaagtgcacttaagcccagcgcctgccacgtgttttttttttttttttttttgacgaatagcaggcgctgggcttaagtgcactttctgttccgttgctccccaaacccc

SEQ ID NO: 788 - DNA, 4757 bp, unidentified; identical to SEQ ID NO: 776
  source 1..4757: mol_type = other DNA

SEQ ID NO: 789 - DNA, 308 bp, unidentified
  source 1..308: mol_type = other DNA
cacgtggcaggcgctgggcttaagtgcactttctgttccgttgctccccaaacccctttctcgatcattattattttttgcgaccttttttttttttttttagcaaattggtaatactcctgcctccacagttttttttttttttttggtcgctttttttttttttttttttttggggtttggggagcaacggaacagaaagtgcacttaagcccagcgcctgccacgtgttttttttttttttttttttcagctatagcaggcgctgggcttaagtgcactttctgttccgttgctccccaaacccc

SEQ ID NO: 790 - DNA, 305 bp, unidentified
  source 1..305: mol_type = other DNA
ggggtttggggagcaacggaacagaaagtgcacttaagcccagcgcctgcagtatgaatttttttttttttttttatcatcgcaggcgctgggcttaagtgcactttctgttccgttgctccccaaaccccttttttttttttttttttttttgcgaccttttttttttttttttccttctcctctaaatcattaccttctataattttttttttttttttggtcgctttttttttttttgatacatttggggtttggggagcaacggaacagaaagtgcacttaagcccagcgcctgcgatgat

SEQ ID NO: 791 - DNA, 4756 bp, unidentified; identical to SEQ ID NO: 779
  source 1..4756: mol_type = other DNA

SEQ ID NO: 792 - DNA, 305 bp, unidentified
  source 1..305: mol_type = other DNA
gcaggcgctgggcttaagtgcactttctgttccgttgctccccaaaccccgtagtgtatttttttttttttttttatcatcggggtttggggagcaacggaacagaaagtgcacttaagcccagcgcctgcttttttttttttttttttttttgcgaccttttttttttttttttgctagaaagagtactgttctggaaactgacttttttttttttttttggtcgctttttttttttttgatacatttgcaggcgctgggcttaagtgcactttctgttccgttgctccccaaaccccgatgat

SEQ ID NO: 793 - DNA, 308 bp, unidentified
  source 1..308: mol_type = other DNA
cacgtgggggtttggggagcaacggaacagaaagtgcacttaagcccagcgcctgctttctcgatcattattattttttgcgaccttttttttttttttttgttgagaatggtgctagtggtagtgaacagttttttttttttttttggtcgctttttttttttttttttttttgcaggcgctgggcttaagtgcactttctgttccgttgctccccaaacccccacgtgttttttttttttttttttttgacgaataggggtttggggagcaacggaacagaaagtgcacttaagcccagcgcctgc

SEQ ID NO: 794 - DNA, 4757 bp, unidentified; identical to SEQ ID NO: 782
  source 1..4757: mol_type = other DNA

SEQ ID NO: 795 - DNA, 308 bp, unidentified
  source 1..308: mol_type = other DNA
cacgtgggggtttggggagcaacggaacagaaagtgcacttaagcccagcgcctgctttctcgatcattattattttttgcgaccttttttttttttttttagcaaattggtaatactcctgcctccacagttttttttttttttttggtcgctttttttttttttttttttttgcaggcgctgggcttaagtgcactttctgttccgttgctccccaaacccccacgtgttttttttttttttttttttcagctataggggtttggggagcaacggaacagaaagtgcacttaagcccagcgcctgc

SEQ ID NO: 796 - DNA, 305 bp, unidentified
  source 1..305: mol_type = other DNA
gcaggcgctgggcttaagtgcactttctgttccgttgctccccaaaccccagtatgaatttttttttttttttttatcatcggggtttggggagcaacggaacagaaagtgcacttaagcccagcgcctgcttttttttttttttttttttttgcgaccttttttttttttttttccttctcctctaaatcattaccttctataattttttttttttttttggtcgctttttttttttttgatacatttgcaggcgctgggcttaagtgcactttctgttccgttgctccccaaaccccgatgat

SEQ ID NO: 797 - DNA, 4756 bp, unidentified; identical to SEQ ID NO: 785
  source 1..4756: mol_type = other DNA

SEQ ID NO: 798 - DNA, 317 bp, unidentified
  source 1..317: mol_type = other DNA
ggggtttggggagcaacggaacagaaagtgcacttaagcccagcgcctgcgtagtgtatttttttttttttttttatcatcgcaggcgctgggcttaagtgcactttctgttccgttgctccccaaaccccttttttttttttttttttttttgcggcgatcggcttttttttttttttttgctagaaagagtactgttctggaaactgacttttttttttttttttgccgatcgccgctttttttttttttgatacatttggggtttggggagcaacggaacagaaagtgcacttaagcccagcgcctgcgatgat

SEQ ID NO: 799 - DNA, 320 bp, unidentified
  source 1..320: mol_type = other DNA
cacgtggcaggcgctgggcttaagtgcactttctgttccgttgctccccaaacccctttctcgatcattattattttttgcggcgatcggcttttttttttttttttgttgagaatggtgctagtggtagtgaacagttttttttttttttttgccgatcgccgctttttttttttttttttttttggggtttggggagcaacggaacagaaagtgcacttaagcccagcgcctgccacgtgttttttttttttttttttttgacgaatagcaggcgctgggcttaagtgcactttctgttccgttgctccccaaacccc

SEQ ID NO: 800 - DNA, 4757 bp, unidentified; identical to SEQ ID NO: 776
  source 1..4757: mol_type = other DNA

SEQ ID NO: 801 - DNA, 320 bp, unidentified
  source 1..320: mol_type = other DNA
cacgtggcaggcgctgggcttaagtgcactttctgttccgttgctccccaaacccctttctcgatcattattattttttgcggcgatcggcttttttttttttttttagcaaattggtaatactcctgcctccacagttttttttttttttttgccgatcgccgctttttttttttttttttttttggggtttggggagcaacggaacagaaagtgcacttaagcccagcgcctgccacgtgttttttttttttttttttttcagctatagcaggcgctgggcttaagtgcactttctgttccgttgctccccaaacccc

SEQ ID NO: 802 - DNA, 317 bp, unidentified
  source 1..317: mol_type = other DNA
ggggtttggggagcaacggaacagaaagtgcacttaagcccagcgcctgcagtatgaatttttttttttttttttatcatcgcaggcgctgggcttaagtgcactttctgttccgttgctccccaaaccccttttttttttttttttttttttgcggcgatcggcttttttttttttttttccttctcctctaaatcattaccttctataattttttttttttttttgccgatcgccgctttttttttttttgatacatttggggtttggggagcaacggaacagaaagtgcacttaagcccagcgcctgcgatgat

SEQ ID NO: 803 - DNA, 4756 bp, unidentified; identical to SEQ ID NO: 779
  source 1..4756: mol_type = other DNA

SEQ ID NO: 804 - DNA, 317 bp, unidentified
  source 1..317: mol_type = other DNA
gcaggcgctgggcttaagtgcactttctgttccgttgctccccaaaccccgtagtgtatttttttttttttttttatcatcggggtttggggagcaacggaacagaaagtgcacttaagcccagcgcctgcttttttttttttttttttttttgcggcgatcggcttttttttttttttttgctagaaagagtactgttctggaaactgacttttttttttttttttgccgatcgccgctttttttttttttgatacatttgcaggcgctgggcttaagtgcactttctgttccgttgctccccaaaccccgatgat

SEQ ID NO: 805 - DNA, 320 bp, unidentified
  source 1..320: mol_type = other DNA
cacgtgggggtttggggagcaacggaacagaaagtgcacttaagcccagcgcctgctttctcgatcattattattttttgcggcgatcggcttttttttttttttttgttgagaatggtgctagtggtagtgaacagttttttttttttttttgccgatcgccgctttttttttttttttttttttgcaggcgctgggcttaagtgcactttctgttccgttgctccccaaacccccacgtgttttttttttttttttttttgacgaataggggtttggggagcaacggaacagaaagtgcacttaagcccagcgcctgc

SEQ ID NO: 806 - DNA, 4757 bp, unidentified; identical to SEQ ID NO: 782
  source 1..4757: mol_type = other DNA

SEQ ID NO: 807 - DNA, 320 bp, unidentified
  source 1..320: mol_type = other DNA
cacgtgggggtttggggagcaacggaacagaaagtgcacttaagcccagcgcctgctttctcgatcattattattttttgcggcgatcggcttttttttttttttttagcaaattggtaatactcctgcctccacagttttttttttttttttgccgatcgccgctttttttttttttttttttttgcaggcgctgggcttaagtgcactttctgttccgttgctccccaaacccccacgtgttttttttttttttttttttcagctataggggtttggggagcaacggaacagaaagtgcacttaagcccagcgcctgc

SEQ ID NO: 808 - DNA, 317 bp, unidentified
  source 1..317: mol_type = other DNA
gcaggcgctgggcttaagtgcactttctgttccgttgctccccaaaccccagtatgaatttttttttttttttttatcatcggggtttggggagcaacggaacagaaagtgcacttaagcccagcgcctgcttttttttttttttttttttttgcggcgatcggcttttttttttttttttccttctcctctaaatcattaccttctataattttttttttttttttgccgatcgccgctttttttttttttgatacatttgcaggcgctgggcttaagtgcactttctgttccgttgctccccaaaccccgatgat

SEQ ID NO: 809 - DNA, 4757 bp, unidentified
  source 1..4757: mol_type = other DNA
ttcatactggggtttggggagcaacggaacagaaagtgcacttaagcccagcgcctgcttttttttttttttttttttttgaacatgcggccgcagtgaacagatccttcccaggatctaggtgggctgaggatttttgagtctgtgacactattgtatatccagctttagtttctgtttaccaccttacagcagcacctaatctcctagaggacttagcccgtgtcacacagcacatatttgccacaccctctgtaaagccctggtttataaggttctttccaccggaagctatgacagaggaaacgtgtgggtggggaggggtagtgggtgagggacccaggttcctgacacagacagactacacccagggaatgaagagcaagcgccatgttgaagccatcattaccattcacatccctcttattcctgcagctgcccctgctgggagtggggctgaacacgacaattctgacgcccaatgggaatgaagacaccacagctggtgggaaatctgggactggagggggctggtgagaagggtggctgtgggaaggggccgtacagagatctggtgcctgccactggccattacaatcatgtgggcagaattgaaaagtggagtgggaagggcaagggggagggttccctgcctcacgctacttcttctttctttctttcttgtttgtttgtttctttctttcttttgaggcagggtctcactatgttgcctaggctggtctcaaactcctggcctctagtgatcctcctgcctcagcctttcaaagcaccaggattacagacatgagccaccgtgcttggcctcctccttctgaccatcatttctctttccctccctgccttcattttctccccaatctagatttcttcctgaccactatgcccactgactccctcagtgtttccactctgcccctcccagaggttcagtgttttgtgttcaatgtcgagtacatgaattgcacttggaacagcagctctgagccccagcctaccaacctcactctgcattattggtatgagaagggacgagggggaggggatgaagaagaggtgggttggatcagagaccaagagagagggtagcaagtctcccaggtaccccactgttttctcctggggtaagtcataagtcggttgaggggagatgaggctaggctctggatatctgcagtacccagattggccccactgttcctcttccttccaacctttctcctctaggtacaagaactcggataatgataaagtccagaagtgcagccactatctattctctgaagaaatcacttctggctgtcagttgcaaaaaaaggagatccacctctaccaaacatttgttgttcagctccaggacccacgggaacccaggagacaggccacacagatgctaaaactgcagaatctgggtaatttggaaagaaagggtcaagagaccagggatactgtgggacattggagtctacagagtagtgttcttttatcataagggtacatgggcagaaaagaggaggtaggggatcatgatgggaagggaggaggtattaggggcactaccttcaggatcctgacttgtctaggccaggggaatgaccacatatgcacacatatctccagtgatcccctgggctccagagaacctaacacttcacaaactgagtgaatcccagctagaactgaactggaacaacagattcttgaaccactgtttggagcacttggtgcagtaccggactgactgggaccacagctggactgtgagtgactagggacgtgaatgtagcagctaaggccaagaaagtagggctaaaggattcaaccagacagatagaaggacctaatatcaagctcctgttctctgcctcccagcttctctgctcaccccctaccctccctcctccaactcctttcccccctattttctccagtgagttttctttttttcttttcttttctttctttctttcttttttttttttttttgagacagagcctcactctgttgcccaggcttgagtgcagtggggcgatcttgggctcactgcgacctctgtctccctggttcaagtgattctcctgcttcagcctcccaagtagctgggagcatgcacaaccatgcctggctaatttttgtatttttagtaaagacagggttttgccatgttggtcaggctggtcttgaactcctgacctcaggtgatctgcccacctcggcctcccaaagtgctgggattacaggcgtgagccaccattcctgacaccagtgagttttcattagggattccctacccatactcttcctgataccagatagacaagtaaacaaaaggaagccattaaggggatccagaggggaggcattagattcaagtcagtgaagggagcagtgtggcttgagtagtcaagagatgagagagaaactgggcagtagcagagatgacactggtgggtgttcaggagtatgttttaattctcccttctctcatagacacccactttccctcatcctctttctcctcaaggaacaatcagtggattatagacataagttctccttgcctagtgtggatgggcagaaacgctacacgtttcgtgttcggagccgctttaacccactctgtggaagtgctcagcattggagtgaatggagccacccaatccactgggggagcaatacttcaaaaggtaaaatgggcccacatgacccaatccatgagcccaacaccccagcctttctaacaccactgtcttttgctccacttccctgtcactaaagcccctaaacttggtgccccatctctccacactgtctaaccccaacctctagaaatcaaggtttttctgtgtagggttgggttagcgtgttgttagagtaggggagtggattgagaaggaggctgaggggtactcaagggggctatagaatgtataggatttccctgaagcattcctagagagcctgcaaggtgaagatggctttggaaccagctggatctaggctgtgccacatactacctctttggccttggccacatccctaaactcttggattctgtttcctaagatgtaagatggaggtaattgttcctgcctcacaggagctgttgtgaggattaaacagagagtatgtctttagcgcggtgcctggcaccagtgcctggcatgtagtaggggcacaacaaatataaggtccactttgcttttcttttttctatagagaatcctttcctgtttgcattggaagccgtggttatctctgttggctccatgggattgattatcagccttctctgtgtgtatttctggctggaacggtgagatttggagaagcccagaaaaatgaggggaacggtagctgacaatagcagaggagggttttgcagggtctttaggagtaaaggatgagacagtaagtaatgagagattacccaagagggtttggtgatggaaggaagccacaggcacagagaacacagaatcactttatttcatatgggacaactgggagaagggtgataaaaaagctttaacctatgtgctcctgctccctctttctcccctgtcaggacgatgccccgaattcccaccctgaagaacctagaggatcttgttactgaataccacgggaacttttcggtgagaacgctgtcataagcatgctgcagtctatcaactgccaactgcctgccagcaagacagacagagtgtgggggtgggggcagagaggagagggaaggaggccctgcactaactgtcaggatgtggccgaccaaatggggcatggactatacagagagagacacacacagaagtgcagattatagattgaatgaggcagatggcaactggtattgggggcccaggagcctgtgtatcccttctgtaatcaattacagtggttgcagacatcatgagtactcctttggcacagagctcggtcttttacttcctgcccctaattgacccctgacctggacatatctgtctttaggcctggagtggtgtgtctaagggactggctgagagtctgcagccagactacagtgaacgactctgcctcgtcagtgagattcccccaaaaggaggggcccttggggaggggcctggggcctccccatgcaaccagcatagcccctactgggcccccccatgttacaccctaaagcctgaaacctgaaccccaatcctctgacagaagaaccccagggtcctgtagccctaagtggtactaactttccttcattcaacccacctgcgtctcatactcacctcaccccactgtggctgatttggaattttgtgcccccatgtaagcaccccttcatttggcattccccacttgagaattacccttttgccccgaacatgtttttcttctccctcagtctggcccttccttttcgcaggattcttcctccctccctctttccctcccttcctctttccatctaccctccgattgttcctgaaccgatgagaaataaagtttctgttgataatcatcaaaaatgtctgtcatgggggtggggagcaggggaagcctgggatgcaatgagggtgggaggggaagaaaaaggagtagtacattcatgctgtggaggcatctaaaaaaataaaaaaaataaaaaaagcattattgactgatgcatgtaacctttttttttttttttttttttttgcaggcgctgggcttaagtgcactttctgttccgttgctccccaaacccctatagctg

SEQ ID NO: 810 - DNA, 311 bp, unidentified
  source 1..311: mol_type = other DNA
ggggtttggggagcaacggaaccaaaaaccaacttaaggcttagctagaggtagtgtatttttttttttttttttatcatcctctagctaagccttaagttggtttttggttccgttgctccccaaaccccttttttttttttttttttttttggcgatcgcttttttttttttttttgctagaaagagtactgttctggaaactgacttttttttttttttttgcgatcgcctttttttttttttgatacatttggggtttggggagcaacggaaccaaaaaccaacttaaggcttagctagaggatgat

SEQ ID NO: 811 - DNA, 314 bp, unidentified
  source 1..314: mol_type = other DNA
cacgtgctctagctaagccttaagttggtttttggttccgttgctccccaaacccctttctcgatcattattattttttggcgatcgcttttttttttttttttgttgagaatggtgctagtggtagtgaacagttttttttttttttttgcgatcgcctttttttttttttttttttttggggtttggggagcaacggaaccaaaaaccaacttaaggcttagctagagcacgtgttttttttttttttttttttgacgaatactctagctaagccttaagttggtttttggttccgttgctccccaaacccc

SEQ ID NO: 812 - DNA, 4757 bp, unidentified
  source 1..4757: mol_type = other DNA
tacactacctctagctaagccttaagttggtttttggttccgttgctccccaaaccccttttttttttttttttttttttggttacatgcatcagtcaataatgctttttttattttttttatttttttagatgcctccacagcatgaatgtactactcctttttcttcccctcccaccctcattgcatcccaggcttcccctgctccccacccccatgacagacatttttgatgattatcaacagaaactttatttctcatcggttcaggaacaatcggagggtagatggaaagaggaagggagggaaagagggagggaggaagaatcctgcgaaaaggaagggccagactgagggagaagaaaaacatgttcggggcaaaagggtaattctcaagtggggaatgccaaatgaaggggtgcttacatgggggcacaaaattccaaatcagccacagtggggtgaggtgagtatgagacgcaggtgggttgaatgaaggaaagttagtaccacttagggctacaggaccctggggttcttctgtcagaggattggggttcaggtttcaggctttagggtgtaacatgggggggcccagtaggggctatgctggttgcatggggaggccccaggcccctccccaagggcccctccttttgggggaatctcactgacgaggcagagtcgttcactgtagtctggctgcagactctcagccagtcccttagacacaccactccaggcctaaagacagatatgtccaggtcaggggtcaattaggggcaggaagtaaaagaccgagctctgtgccaaaggagtactcatgatgtctgcaaccactgtaattgattacagaagggatacacaggctcctgggcccccaataccagttgccatctgcctcattcaatctataatctgcacttctgtgtgtgtctctctctgtatagtccatgccccatttggtcggccacatcctgacagttagtgcagggcctccttccctctcctctctgcccccacccccacactctgtctgtcttgctggcaggcagttggcagttgatagactgcagcatgcttatgacagcgttctcaccgaaaagttcccgtggtattcagtaacaagatcctctaggttcttcagggtgggaattcggggcatcgtcctgacaggggagaaagagggagcaggagcacataggttaaagcttttttatcacccttctcccagttgtcccatatgaaataaagtgattctgtgttctctgtgcctgtggcttccttccatcaccaaaccctcttgggtaatctctcattacttactgtctcatcctttactcctaaagaccctgcaaaaccctcctctgctattgtcagctaccgttcccctcatttttctgggcttctccaaatctcaccgttccagccagaaatacacacagagaaggctgataatcaatcccatggagccaacagagataaccacggcttccaatgcaaacaggaaaggattctctatagaaaaaagaaaagcaaagtggaccttatatttgttgtgcccctactacatgccaggcactggtgccaggcaccgcgctaaagacatactctctgtttaatcctcacaacagctcctgtgaggcaggaacaattacctccatcttacatcttaggaaacagaatccaagagtttagggatgtggccaaggccaaagaggtagtatgtggcacagcctagatccagctggttccaaagccatcttcaccttgcaggctctctaggaatgcttcagggaaatcctatacattctatagcccccttgagtacccctcagcctccttctcaatccactcccctactctaacaacacgctaacccaaccctacacagaaaaaccttgatttctagaggttggggttagacagtgtggagagatggggcaccaagtttaggggctttagtgacagggaagtggagcaaaagacagtggtgttagaaaggctggggtgttgggctcatggattgggtcatgtgggcccattttaccttttgaagtattgctcccccagtggattgggtggctccattcactccaatgctgagcacttccacagagtgggttaaagcggctccgaacacgaaacgtgtagcgtttctgcccatccacactaggcaaggagaacttatgtctataatccactgattgttccttgaggagaaagaggatgagggaaagtgggtgtctatgagagaagggagaattaaaacatactcctgaacacccaccagtgtcatctctgctactgcccagtttctctctcatctcttgactactcaagccacactgctcccttcactgacttgaatctaatgcctcccctctggatccccttaatggcttccttttgtttacttgtctatctggtatcaggaagagtatgggtagggaatccctaatgaaaactcactggtgtcaggaatggtggctcacgcctgtaatcccagcactttgggaggccgaggtgggcagatcacctgaggtcaggagttcaagaccagcctgaccaacatggcaaaaccctgtctttactaaaaatacaaaaattagccaggcatggttgtgcatgctcccagctacttgggaggctgaagcaggagaatcacttgaaccagggagacagaggtcgcagtgagcccaagatcgccccactgcactcaagcctgggcaacagagtgaggctctgtctcaaaaaaaaaaaaaaaagaaagaaagaaagaaaagaaaagaaaaaaagaaaactcactggagaaaataggggggaaaggagttggaggagggagggtagggggtgagcagagaagctgggaggcagagaacaggagcttgatattaggtccttctatctgtctggttgaatcctttagccctactttcttggccttagctgctacattcacgtccctagtcactcacagtccagctgtggtcccagtcagtccggtactgcaccaagtgctccaaacagtggttcaagaatctgttgttccagttcagttctagctgggattcactcagtttgtgaagtgttaggttctctggagcccaggggatcactggagatatgtgtgcatatgtggtcattcccctggcctagacaagtcaggatcctgaaggtagtgcccctaatacctcctcccttcccatcatgatcccctacctcctcttttctgcccatgtacccttatgataaaagaacactactctgtagactccaatgtcccacagtatccctggtctcttgaccctttctttccaaattacccagattctgcagttttagcatctgtgtggcctgtctcctgggttcccgtgggtcctggagctgaacaacaaatgtttggtagaggtggatctcctttttttgcaactgacagccagaagtgatttcttcagagaatagatagtggctgcacttctggactttatcattatccgagttcttgtacctagaggagaaaggttggaaggaagaggaacagtggggccaatctgggtactgcagatatccagagcctagcctcatctcccctcaaccgacttatgacttaccccaggagaaaacagtggggtacctgggagacttgctaccctctctcttggtctctgatccaacccacctcttcttcatcccctccccctcgtcccttctcataccaataatgcagagtgaggttggtaggctggggctcagagctgctgttccaagtgcaattcatgtactcgacattgaacacaaaacactgaacctctgggaggggcagagtggaaacactgagggagtcagtgggcatagtggtcaggaagaaatctagattggggagaaaatgaaggcagggagggaaagagaaatgatggtcagaaggaggaggccaagcacggtggctcatgtctgtaatcctggtgctttgaaaggctgaggcaggaggatcactagaggccaggagtttgagaccagcctaggcaacatagtgagaccctgcctcaaaagaaagaaagaaacaaacaaacaagaaagaaagaaagaagaagtagcgtgaggcagggaaccctcccccttgcccttcccactccacttttcaattctgcccacatgattgtaatggccagtggcaggcaccagatctctgtacggccccttcccacagccacccttctcaccagccccctccagtcccagatttcccaccagctgtggtgtcttcattcccattgggcgtcagaattgtcgtgttcagccccactcccagcaggggcagctgcaggaataagagggatgtgaatggtaatgatggcttcaacatggcgcttgctcttcattccctgggtgtagtctgtctgtgtcaggaacctgggtccctcacccactacccctccccacccacacgtttcctctgtcatagcttccggtggaaagaaccttataaaccagggctttacagagggtgtggcaaatatgtgctgtgtgacacgggctaagtcctctaggagattaggtgctgctgtaaggtggtaaacagaaactaaagctggatatacaatagtgtcacagactcaaaaatcctcagcccacctagatcctgggaaggatctgttcactgcggccgcatgttctttttttttttttttttttttttggggtttggggagcaacggaaccaaaaaccaacttaaggcttagctagagtattcgtc

SEQ ID NO: 813 - DNA, 314 bp, unidentified
  source 1..314: mol_type = other DNA
cacgtgctctagctaagccttaagttggtttttggttccgttgctccccaaacccctttctcgatcattattattttttggcgatcgcttttttttttttttttagcaaattggtaatactcctgcctccacagttttttttttttttttgcgatcgcctttttttttttttttttttttggggtttggggagcaacggaaccaaaaaccaacttaaggcttagctagagcacgtgttttttttttttttttttttcagctatactctagctaagccttaagttggtttttggttccgttgctccccaaacccc

SEQ ID NO: 814 - DNA, 311 bp, unidentified
  source 1..311: mol_type = other DNA
ggggtttggggagcaacggaaccaaaaaccaacttaaggcttagctagagagtatgaatttttttttttttttttatcatcctctagctaagccttaagttggtttttggttccgttgctccccaaaccccttttttttttttttttttttttggcgatcgcttttttttttttttttccttctcctctaaatcattaccttctataattttttttttttttttgcgatcgcctttttttttttttgatacatttggggtttggggagcaacggaaccaaaaaccaacttaaggcttagctagaggatgat

SEQ ID NO: 815 - DNA, 4756 bp, unidentified
  source 1..4756: mol_type = other DNA
ttcatactctctagctaagccttaagttggtttttggttccgttgctccccaaaccccttttttttttttttttttttttgaacatgcggccgcgtgaacagatccttcccaggatctaggtgggctgaggatttttgagtctgtgacactattgtatatccagctttagtttctgtttaccaccttacagcagcacctaatctcctagaggacttagcccgtgtcacacagcacatatttgccacaccctctgtaaagccctggtttataaggttctttccaccggaagctatgacagaggaaacgtgtgggtggggaggggtagtgggtgagggacccaggttcctgacacagacagactacacccagggaatgaagagcaagcgccatgttgaagccatcattaccattcacatccctcttattcctgcagctgcccctgctgggagtggggctgaacacgacaattctgacgcccaatgggaatgaagacaccacagctggtgggaaatctgggactggagggggctggtgagaagggtggctgtgggaaggggccgtacagagatctggtgcctgccactggccattacaatcatgtgggcagaattgaaaagtggagtgggaagggcaagggggagggttccctgcctcacgctacttcttctttctttctttcttgtttgtttgtttctttctttcttttgaggcagggtctcactatgttgcctaggctggtctcaaactcctggcctctagtgatcctcctgcctcagcctttcaaagcaccaggattacagacatgagccaccgtgcttggcctcctccttctgaccatcatttctctttccctccctgccttcattttctccccaatctagatttcttcctgaccactatgcccactgactccctcagtgtttccactctgcccctcccagaggttcagtgttttgtgttcaatgtcgagtacatgaattgcacttggaacagcagctctgagccccagcctaccaacctcactctgcattattggtatgagaagggacgagggggaggggatgaagaagaggtgggttggatcagagaccaagagagagggtagcaagtctcccaggtaccccactgttttctcctggggtaagtcataagtcggttgaggggagatgaggctaggctctggatatctgcagtacccagattggccccactgttcctcttccttccaacctttctcctctaggtacaagaactcggataatgataaagtccagaagtgcagccactatctattctctgaagaaatcacttctggctgtcagttgcaaaaaaaggagatccacctctaccaaacatttgttgttcagctccaggacccacgggaacccaggagacaggccacacagatgctaaaactgcagaatctgggtaatttggaaagaaagggtcaagagaccagggatactgtgggacattggagtctacagagtagtgttcttttatcataagggtacatgggcagaaaagaggaggtaggggatcatgatgggaagggaggaggtattaggggcactaccttcaggatcctgacttgtctaggccaggggaatgaccacatatgcacacatatctccagtgatcccctgggctccagagaacctaacacttcacaaactgagtgaatcccagctagaactgaactggaacaacagattcttgaaccactgtttggagcacttggtgcagtaccggactgactgggaccacagctggactgtgagtgactagggacgtgaatgtagcagctaaggccaagaaagtagggctaaaggattcaaccagacagatagaaggacctaatatcaagctcctgttctctgcctcccagcttctctgctcaccccctaccctccctcctccaactcctttcccccctattttctccagtgagttttctttttttcttttcttttctttctttctttcttttttttttttttttgagacagagcctcactctgttgcccaggcttgagtgcagtggggcgatcttgggctcactgcgacctctgtctccctggttcaagtgattctcctgcttcagcctcccaagtagctgggagcatgcacaaccatgcctggctaatttttgtatttttagtaaagacagggttttgccatgttggtcaggctggtcttgaactcctgacctcaggtgatctgcccacctcggcctcccaaagtgctgggattacaggcgtgagccaccattcctgacaccagtgagttttcattagggattccctacccatactcttcctgataccagatagacaagtaaacaaaaggaagccattaaggggatccagaggggaggcattagattcaagtcagtgaagggagcagtgtggcttgagtagtcaagagatgagagagaaactgggcagtagcagagatgacactggtgggtgttcaggagtatgttttaattctcccttctctcatagacacccactttccctcatcctctttctcctcaaggaacaatcagtggattatagacataagttctccttgcctagtgtggatgggcagaaacgctacacgtttcgtgttcggagccgctttaacccactctgtggaagtgctcagcattggagtgaatggagccacccaatccactgggggagcaatacttcaaaaggtaaaatgggcccacatgacccaatccatgagcccaacaccccagcctttctaacaccactgtcttttgctccacttccctgtcactaaagcccctaaacttggtgccccatctctccacactgtctaaccccaacctctagaaatcaaggtttttctgtgtagggttgggttagcgtgttgttagagtaggggagtggattgagaaggaggctgaggggtactcaagggggctatagaatgtataggatttccctgaagcattcctagagagcctgcaaggtgaagatggctttggaaccagctggatctaggctgtgccacatactacctctttggccttggccacatccctaaactcttggattctgtttcctaagatgtaagatggaggtaattgttcctgcctcacaggagctgttgtgaggattaaacagagagtatgtctttagcgcggtgcctggcaccagtgcctggcatgtagtaggggcacaacaaatataaggtccactttgcttttcttttttctatagagaatcctttcctgtttgcattggaagccgtggttatctctgttggctccatgggattgattatcagccttctctgtgtgtatttctggctggaacggtgagatttggagaagcccagaaaaatgaggggaacggtagctgacaatagcagaggagggttttgcagggtctttaggagtaaaggatgagacagtaagtaatgagagattacccaagagggtttggtgatggaaggaagccacaggcacagagaacacagaatcactttatttcatatgggacaactgggagaagggtgataaaaaagctttaacctatgtgctcctgctccctctttctcccctgtcaggacgatgccccgaattcccaccctgaagaacctagaggatcttgttactgaataccacgggaacttttcggtgagaacgctgtcataagcatgctgcagtctatcaactgccaactgcctgccagcaagacagacagagtgtgggggtgggggcagagaggagagggaaggaggccctgcactaactgtcaggatgtggccgaccaaatggggcatggactatacagagagagacacacacagaagtgcagattatagattgaatgaggcagatggcaactggtattgggggcccaggagcctgtgtatcccttctgtaatcaattacagtggttgcagacatcatgagtactcctttggcacagagctcggtcttttacttcctgcccctaattgacccctgacctggacatatctgtctttaggcctggagtggtgtgtctaagggactggctgagagtctgcagccagactacagtgaacgactctgcctcgtcagtgagattcccccaaaaggaggggcccttggggaggggcctggggcctccccatgcaaccagcatagcccctactgggcccccccatgttacaccctaaagcctgaaacctgaaccccaatcctctgacagaagaaccccagggtcctgtagccctaagtggtactaactttccttcattcaacccacctgcgtctcatactcacctcaccccactgtggctgatttggaattttgtgcccccatgtaagcaccccttcatttggcattccccacttgagaattacccttttgccccgaacatgtttttcttctccctcagtctggcccttccttttcgcaggattcttcctccctccctctttccctcccttcctctttccatctaccctccgattgttcctgaaccgatgagaaataaagtttctgttgataatcatcaaaaatgtctgtcatgggggtggggagcaggggaagcctgggatgcaatgagggtgggaggggaagaaaaaggagtagtacattcatgctgtggaggcatctaaaaaaataaaaaaaataaaaaaagcattattgactgatgcatgtaacctttttttttttttttttttttttggggtttggggagcaacggaaccaaaaaccaacttaaggcttagctagagtatagctg

SEQ ID NO: 816 - DNA, 311 bp, unidentified
  source 1..311: mol_type = other DNA
ctctagctaagccttaagttggtttttggttccgttgctccccaaaccccgtagtgtatttttttttttttttttatcatcggggtttggggagcaacggaaccaaaaaccaacttaaggcttagctagagttttttttttttttttttttttggcgatcgcttttttttttttttttgctagaaagagtactgttctggaaactgacttttttttttttttttgcgatcgcctttttttttttttgatacatttctctagctaagccttaagttggtttttggttccgttgctccccaaaccccgatgat

SEQ ID NO: 817 - DNA, 314 bp, unidentified
  source 1..314: mol_type = other DNA
cacgtgggggtttggggagcaacggaaccaaaaaccaacttaaggcttagctagagtttctcgatcattattattttttggcgatcgcttttttttttttttttgttgagaatggtgctagtggtagtgaacagttttttttttttttttgcgatcgcctttttttttttttttttttttctctagctaagccttaagttggtttttggttccgttgctccccaaacccccacgtgttttttttttttttttttttgacgaataggggtttggggagcaacggaaccaaaaaccaacttaaggcttagctagag

SEQ ID NO: 818 - DNA, 4757 bp, unidentified
  source 1..4757: mol_type = other DNA
tacactacggggtttggggagcaacggaaccaaaaaccaacttaaggcttagctagagttttttttttttttttttttttggttacatgcatcagtcaataatgctttttttattttttttatttttttagatgcctccacagcatgaatgtactactcctttttcttcccctcccaccctcattgcatcccaggcttcccctgctccccacccccatgacagacatttttgatgattatcaacagaaactttatttctcatcggttcaggaacaatcggagggtagatggaaagaggaagggagggaaagagggagggaggaagaatcctgcgaaaaggaagggccagactgagggagaagaaaaacatgttcggggcaaaagggtaattctcaagtggggaatgccaaatgaaggggtgcttacatgggggcacaaaattccaaatcagccacagtggggtgaggtgagtatgagacgcaggtgggttgaatgaaggaaagttagtaccacttagggctacaggaccctggggttcttctgtcagaggattggggttcaggtttcaggctttagggtgtaacatgggggggcccagtaggggctatgctggttgcatggggaggccccaggcccctccccaagggcccctccttttgggggaatctcactgacgaggcagagtcgttcactgtagtctggctgcagactctcagccagtcccttagacacaccactccaggcctaaagacagatatgtccaggtcaggggtcaattaggggcaggaagtaaaagaccgagctctgtgccaaaggagtactcatgatgtctgcaaccactgtaattgattacagaagggatacacaggctcctgggcccccaataccagttgccatctgcctcattcaatctataatctgcacttctgtgtgtgtctctctctgtatagtccatgccccatttggtcggccacatcctgacagttagtgcagggcctccttccctctcctctctgcccccacccccacactctgtctgtcttgctggcaggcagttggcagttgatagactgcagcatgcttatgacagcgttctcaccgaaaagttcccgtggtattcagtaacaagatcctctaggttcttcagggtgggaattcggggcatcgtcctgacaggggagaaagagggagcaggagcacataggttaaagcttttttatcacccttctcccagttgtcccatatgaaataaagtgattctgtgttctctgtgcctgtggcttccttccatcaccaaaccctcttgggtaatctctcattacttactgtctcatcctttactcctaaagaccctgcaaaaccctcctctgctattgtcagctaccgttcccctcatttttctgggcttctccaaatctcaccgttccagccagaaatacacacagagaaggctgataatcaatcccatggagccaacagagataaccacggcttccaatgcaaacaggaaaggattctctatagaaaaaagaaaagcaaagtggaccttatatttgttgtgcccctactacatgccaggcactggtgccaggcaccgcgctaaagacatactctctgtttaatcctcacaacagctcctgtgaggcaggaacaattacctccatcttacatcttaggaaacagaatccaagagtttagggatgtggccaaggccaaagaggtagtatgtggcacagcctagatccagctggttccaaagccatcttcaccttgcaggctctctaggaatgcttcagggaaatcctatacattctatagcccccttgagtacccctcagcctccttctcaatccactcccctactctaacaacacgctaacccaaccctacacagaaaaaccttgatttctagaggttggggttagacagtgtggagagatggggcaccaagtttaggggctttagtgacagggaagtggagcaaaagacagtggtgttagaaaggctggggtgttgggctcatggattgggtcatgtgggcccattttaccttttgaagtattgctcccccagtggattgggtggctccattcactccaatgctgagcacttccacagagtgggttaaagcggctccgaacacgaaacgtgtagcgtttctgcccatccacactaggcaaggagaacttatgtctataatccactgattgttccttgaggagaaagaggatgagggaaagtgggtgtctatgagagaagggagaattaaaacatactcctgaacacccaccagtgtcatctctgctactgcccagtttctctctcatctcttgactactcaagccacactgctcccttcactgacttgaatctaatgcctcccctctggatccccttaatggcttccttttgtttacttgtctatctggtatcaggaagagtatgggtagggaatccctaatgaaaactcactggtgtcaggaatggtggctcacgcctgtaatcccagcactttgggaggccgaggtgggcagatcacctgaggtcaggagttcaagaccagcctgaccaacatggcaaaaccctgtctttactaaaaatacaaaaattagccaggcatggttgtgcatgctcccagctacttgggaggctgaagcaggagaatcacttgaaccagggagacagaggtcgcagtgagcccaagatcgccccactgcactcaagcctgggcaacagagtgaggctctgtctcaaaaaaaaaaaaaaaagaaagaaagaaagaaaagaaaagaaaaaaagaaaactcactggagaaaataggggggaaaggagttggaggagggagggtagggggtgagcagagaagctgggaggcagagaacaggagcttgatattaggtccttctatctgtctggttgaatcctttagccctactttcttggccttagctgctacattcacgtccctagtcactcacagtccagctgtggtcccagtcagtccggtactgcaccaagtgctccaaacagtggttcaagaatctgttgttccagttcagttctagctgggattcactcagtttgtgaagtgttaggttctctggagcccaggggatcactggagatatgtgtgcatatgtggtcattcccctggcctagacaagtcaggatcctgaaggtagtgcccctaatacctcctcccttcccatcatgatcccctacctcctcttttctgcccatgtacccttatgataaaagaacactactctgtagactccaatgtcccacagtatccctggtctcttgaccctttctttccaaattacccagattctgcagttttagcatctgtgtggcctgtctcctgggttcccgtgggtcctggagctgaacaacaaatgtttggtagaggtggatctcctttttttgcaactgacagccagaagtgatttcttcagagaatagatagtggctgcacttctggactttatcattatccgagttcttgtacctagaggagaaaggttggaaggaagaggaacagtggggccaatctgggtactgcagatatccagagcctagcctcatctcccctcaaccgacttatgacttaccccaggagaaaacagtggggtacctgggagacttgctaccctctctcttggtctctgatccaacccacctcttcttcatcccctccccctcgtcccttctcataccaataatgcagagtgaggttggtaggctggggctcagagctgctgttccaagtgcaattcatgtactcgacattgaacacaaaacactgaacctctgggaggggcagagtggaaacactgagggagtcagtgggcatagtggtcaggaagaaatctagattggggagaaaatgaaggcagggagggaaagagaaatgatggtcagaaggaggaggccaagcacggtggctcatgtctgtaatcctggtgctttgaaaggctgaggcaggaggatcactagaggccaggagtttgagaccagcctaggcaacatagtgagaccctgcctcaaaagaaagaaagaaacaaacaaacaagaaagaaagaaagaagaagtagcgtgaggcagggaaccctcccccttgcccttcccactccacttttcaattctgcccacatgattgtaatggccagtggcaggcaccagatctctgtacggccccttcccacagccacccttctcaccagccccctccagtcccagatttcccaccagctgtggtgtcttcattcccattgggcgtcagaattgtcgtgttcagccccactcccagcaggggcagctgcaggaataagagggatgtgaatggtaatgatggcttcaacatggcgcttgctcttcattccctgggtgtagtctgtctgtgtcaggaacctgggtccctcacccactacccctccccacccacacgtttcctctgtcatagcttccggtggaaagaaccttataaaccagggctttacagagggtgtggcaaatatgtgctgtgtgacacgggctaagtcctctaggagattaggtgctgctgtaaggtggtaaacagaaactaaagctggatatacaatagtgtcacagactcaaaaatcctcagcccacctagatcctgggaaggatctgttcactgcggccgcatgttctttttttttttttttttttttttctctagctaagccttaagttggtttttggttccgttgctccccaaacccctattcgtc

SEQ ID NO: 819 - DNA, 314 bp, unidentified
  source 1..314: mol_type = other DNA
cacgtgggggtttggggagcaacggaaccaaaaaccaacttaaggcttagctagagtttctcgatcattattattttttggcgatcgcttttttttttttttttagcaaattggtaatactcctgcctccacagttttttttttttttttgcgatcgcctttttttttttttttttttttctctagctaagccttaagttggtttttggttccgttgctccccaaacccccacgtgttttttttttttttttttttcagctataggggtttggggagcaacggaaccaaaaaccaacttaaggcttagctagag

SEQ ID NO: 820 - DNA, 311 bp, unidentified
  source 1..311: mol_type = other DNA
ctctagctaagccttaagttggtttttggttccgttgctccccaaaccccagtatgaatttttttttttttttttatcatcggggtttggggagcaacggaaccaaaaaccaacttaaggcttagctagagttttttttttttttttttttttggcgatcgcttttttttttttttttccttctcctctaaatcattaccttctataattttttttttttttttgcgatcgcctttttttttttttgatacatttctctagctaagccttaagttggtttttggttccgttgctccccaaaccccgatgat

SEQ ID NO: 821 - DNA, 4756 bp, unidentified
  source 1..4756: mol_type = other DNA
ttcatactggggtttggggagcaacggaaccaaaaaccaacttaaggcttagctagagttttttttttttttttttttttgaacatgcggccgcgtgaacagatccttcccaggatctaggtgggctgaggatttttgagtctgtgacactattgtatatccagctttagtttctgtttaccaccttacagcagcacctaatctcctagaggacttagcccgtgtcacacagcacatatttgccacaccctctgtaaagccctggtttataaggttctttccaccggaagctatgacagaggaaacgtgtgggtggggaggggtagtgggtgagggacccaggttcctgacacagacagactacacccagggaatgaagagcaagcgccatgttgaagccatcattaccattcacatccctcttattcctgcagctgcccctgctgggagtggggctgaacacgacaattctgacgcccaatgggaatgaagacaccacagctggtgggaaatctgggactggagggggctggtgagaagggtggctgtgggaaggggccgtacagagatctggtgcctgccactggccattacaatcatgtgggcagaattgaaaagtggagtgggaagggcaagggggagggttccctgcctcacgctacttcttctttctttctttcttgtttgtttgtttctttctttcttttgaggcagggtctcactatgttgcctaggctggtctcaaactcctggcctctagtgatcctcctgcctcagcctttcaaagcaccaggattacagacatgagccaccgtgcttggcctcctccttctgaccatcatttctctttccctccctgccttcattttctccccaatctagatttcttcctgaccactatgcccactgactccctcagtgtttccactctgcccctcccagaggttcagtgttttgtgttcaatgtcgagtacatgaattgcacttggaacagcagctctgagccccagcctaccaacctcactctgcattattggtatgagaagggacgagggggaggggatgaagaagaggtgggttggatcagagaccaagagagagggtagcaagtctcccaggtaccccactgttttctcctggggtaagtcataagtcggttgaggggagatgaggctaggctctggatatctgcagtacccagattggccccactgttcctcttccttccaacctttctcctctaggtacaagaactcggataatgataaagtccagaagtgcagccactatctattctctgaagaaatcacttctggctgtcagttgcaaaaaaaggagatccacctctaccaaacatttgttgttcagctccaggacccacgggaacccaggagacaggccacacagatgctaaaactgcagaatctgggtaatttggaaagaaagggtcaagagaccagggatactgtgggacattggagtctacagagtagtgttcttttatcataagggtacatgggcagaaaagaggaggtaggggatcatgatgggaagggaggaggtattaggggcactaccttcaggatcctgacttgtctaggccaggggaatgaccacatatgcacacatatctccagtgatcccctgggctccagagaacctaacacttcacaaactgagtgaatcccagctagaactgaactggaacaacagattcttgaaccactgtttggagcacttggtgcagtaccggactgactgggaccacagctggactgtgagtgactagggacgtgaatgtagcagctaaggccaagaaagtagggctaaaggattcaaccagacagatagaaggacctaatatcaagctcctgttctctgcctcccagcttctctgctcaccccctaccctccctcctccaactcctttcccccctattttctccagtgagttttctttttttcttttcttttctttctttctttcttttttttttttttttgagacagagcctcactctgttgcccaggcttgagtgcagtggggcgatcttgggctcactgcgacctctgtctccctggttcaagtgattctcctgcttcagcctcccaagtagctgggagcatgcacaaccatgcctggctaatttttgtatttttagtaaagacagggttttgccatgttggtcaggctggtcttgaactcctgacctcaggtgatctgcccacctcggcctcccaaagtgctgggattacaggcgtgagccaccattcctgacaccagtgagttttcattagggattccctacccatactcttcctgataccagatagacaagtaaacaaaaggaagccattaaggggatccagaggggaggcattagattcaagtcagtgaagggagcagtgtggcttgagtagtcaagagatgagagagaaactgggcagtagcagagatgacactggtgggtgttcaggagtatgttttaattctcccttctctcatagacacccactttccctcatcctctttctcctcaaggaacaatcagtggattatagacataagttctccttgcctagtgtggatgggcagaaacgctacacgtttcgtgttcggagccgctttaacccactctgtggaagtgctcagcattggagtgaatggagccacccaatccactgggggagcaatacttcaaaaggtaaaatgggcccacatgacccaatccatgagcccaacaccccagcctttctaacaccactgtcttttgctccacttccctgtcactaaagcccctaaacttggtgccccatctctccacactgtctaaccccaacctctagaaatcaaggtttttctgtgtagggttgggttagcgtgttgttagagtaggggagtggattgagaaggaggctgaggggtactcaagggggctatagaatgtataggatttccctgaagcattcctagagagcctgcaaggtgaagatggctttggaaccagctggatctaggctgtgccacatactacctctttggccttggccacatccctaaactcttggattctgtttcctaagatgtaagatggaggtaattgttcctgcctcacaggagctgttgtgaggattaaacagagagtatgtctttagcgcggtgcctggcaccagtgcctggcatgtagtaggggcacaacaaatataaggtccactttgcttttcttttttctatagagaatcctttcctgtttgcattggaagccgtggttatctctgttggctccatgggattgattatcagccttctctgtgtgtatttctggctggaacggtgagatttggagaagcccagaaaaatgaggggaacggtagctgacaatagcagaggagggttttgcagggtctttaggagtaaaggatgagacagtaagtaatgagagattacccaagagggtttggtgatggaaggaagccacaggcacagagaacacagaatcactttatttcatatgggacaactgggagaagggtgataaaaaagctttaacctatgtgctcctgctccctctttctcccctgtcaggacgatgccccgaattcccaccctgaagaacctagaggatcttgttactgaataccacgggaacttttcggtgagaacgctgtcataagcatgctgcagtctatcaactgccaactgcctgccagcaagacagacagagtgtgggggtgggggcagagaggagagggaaggaggccctgcactaactgtcaggatgtggccgaccaaatggggcatggactatacagagagagacacacacagaagtgcagattatagattgaatgaggcagatggcaactggtattgggggcccaggagcctgtgtatcccttctgtaatcaattacagtggttgcagacatcatgagtactcctttggcacagagctcggtcttttacttcctgcccctaattgacccctgacctggacatatctgtctttaggcctggagtggtgtgtctaagggactggctgagagtctgcagccagactacagtgaacgactctgcctcgtcagtgagattcccccaaaaggaggggcccttggggaggggcctggggcctccccatgcaaccagcatagcccctactgggcccccccatgttacaccctaaagcctgaaacctgaaccccaatcctctgacagaagaaccccagggtcctgtagccctaagtggtactaactttccttcattcaacccacctgcgtctcatactcacctcaccccactgtggctgatttggaattttgtgcccccatgtaagcaccccttcatttggcattccccacttgagaattacccttttgccccgaacatgtttttcttctccctcagtctggcccttccttttcgcaggattcttcctccctccctctttccctcccttcctctttccatctaccctccgattgttcctgaaccgatgagaaataaagtttctgttgataatcatcaaaaatgtctgtcatgggggtggggagcaggggaagcctgggatgcaatgagggtgggaggggaagaaaaaggagtagtacattcatgctgtggaggcatctaaaaaaataaaaaaaataaaaaaagcattattgactgatgcatgtaacctttttttttttttttttttttttctctagctaagccttaagttggtttttggttccgttgctccccaaacccctatagctg

SEQ ID NO: 822 - DNA, 305 bp, unidentified
  source 1..305: mol_type = other DNA
ggggtttggggagcaacggaaccaaaaaccaacttaaggcttagctagaggtagtgtatttttttttttttttttatcatcctctagctaagccttaagttggtttttggttccgttgctccccaaaccccttttttttttttttttttttttgcgaccttttttttttttttttgctagaaagagtactgttctggaaactgacttttttttttttttttggtcgctttttttttttttgatacatttggggtttggggagcaacggaaccaaaaaccaacttaaggcttagctagaggatgat

SEQ ID NO: 823 - DNA, 307 bp, unidentified
  source 1..307: mol_type = other DNA
cacgtgctctagctaagccttaagttggtttttggttccgttgctccccaaacccctttctcgatcattattattttttgcgaccttttttttttttttttgttgagaatggtgctagtggtagtgaacagtttttttttttttttggtcgctttttttttttttttttttttggggtttggggagcaacggaaccaaaaaccaacttaaggcttagctagagcacgtgttttttttttttttttttttgacgaatactctagctaagccttaagttggtttttggttccgttgctccccaaacccc

SEQ ID NO: 824 - DNA, 4757 bp, unidentified; identical to SEQ ID NO: 812
  source 1..4757: mol_type = other DNA

SEQ ID NO: 825 - DNA, 308 bp, unidentified
  source 1..308: mol_type = other DNA
cacgtgctctagctaagccttaagttggtttttggttccgttgctccccaaacccctttctcgatcattattattttttgcgaccttttttttttttttttagcaaattggtaatactcctgcctccacagttttttttttttttttggtcgctttttttttttttttttttttggggtttggggagcaacggaaccaaaaaccaacttaaggcttagctagagcacgtgttttttttttttttttttttcagctatactctagctaagccttaagttggtttttggttccgttgctccccaaacccc

SEQ ID NO: 826 - DNA, 305 bp, unidentified
  source 1..305: mol_type = other DNA
ggggtttggggagcaacggaaccaaaaaccaacttaaggcttagctagagagtatgaatttttttttttttttttatcatcctctagctaagccttaagttggtttttggttccgttgctccccaaaccccttttttttttttttttttttttgcgaccttttttttttttttttccttctcctctaaatcattaccttctataattttttttttttttttggtcgctttttttttttttgatacatttggggtttggggagcaacggaaccaaaaaccaacttaaggcttagctagaggatgat

SEQ ID NO: 827 - DNA, 4756 bp, unidentified; identical to SEQ ID NO: 815
  source 1..4756: mol_type = other DNA

SEQ ID NO: 828 - DNA, 305 bp, unidentified
  source 1..305: mol_type = other DNA
ctctagctaagccttaagttggtttttggttccgttgctccccaaaccccgtagtgtatttttttttttttttttatcatcggggtttggggagcaacggaaccaaaaaccaacttaaggcttagctagagttttttttttttttttttttttgcgaccttttttttttttttttgctagaaagagtactgttctggaaactgacttttttttttttttttggtcgctttttttttttttgatacatttctctagctaagccttaagttggtttttggttccgttgctccccaaaccccgatgat

SEQ ID NO: 829 - DNA, 308 bp, unidentified
  source 1..308: mol_type = other DNA
cacgtgggggtttggggagcaacggaaccaaaaaccaacttaaggcttagctagagtttctcgatcattattattttttgcgaccttttttttttttttttgttgagaatggtgctagtggtagtgaacagttttttttttttttttggtcgctttttttttttttttttttttctctagctaagccttaagttggtttttggttccgttgctccccaaacccccacgtgttttttttttttttttttttgacgaataggggtttggggagcaacggaaccaaaaaccaacttaaggcttagctagag

SEQ ID NO: 830 - DNA, 4757 bp, unidentified; identical to SEQ ID NO: 818
  source 1..4757: mol_type = other DNA

SEQ ID NO: 831 - DNA, 308 bp, unidentified
  source 1..308: mol_type = other DNA
cacgtgggggtttggggagcaacggaaccaaaaaccaacttaaggcttagctagagtttctcgatcattattattttttgcgaccttttttttttttttttagcaaattggtaatactcctgcctccacagttttttttttttttttggtcgctttttttttttttttttttttctctagctaagccttaagttggtttttggttccgttgctccccaaacccccacgtgttttttttttttttttttttcagctataggggtttggggagcaacggaaccaaaaaccaacttaaggcttagctagag

SEQ ID NO: 832 - DNA, 305 bp, unidentified
  source 1..305: mol_type = other DNA
ctctagctaagccttaagttggtttttggttccgttgctccccaaaccccagtatgaatttttttttttttttttatcatcggggtttggggagcaacggaaccaaaaaccaacttaaggcttagctagagttttttttttttttttttttttgcgaccttttttttttttttttccttctcctctaaatcattaccttctataattttttttttttttttggtcgctttttttttttttgatacatttctctagctaagccttaagttggtttttggttccgttgctccccaaaccccgatgat

SEQ ID NO: 833 - DNA, 4756 bp, unidentified; identical to SEQ ID NO: 821
  source 1..4756: mol_type = other DNA

SEQ ID NO: 834 - DNA, 317 bp, unidentified
  source 1..317: mol_type = other DNA
ggggtttggggagcaacggaaccaaaaaccaacttaaggcttagctagaggtagtgtatttttttttttttttttatcatcctctagctaagccttaagttggtttttggttccgttgctccccaaaccccttttttttttttttttttttttgcggcgatcggcttttttttttttttttgctagaaagagtactgttctggaaactgacttttttttttttttttgccgatcgccgctttttttttttttgatacatttggggtttggggagcaacggaaccaaaaaccaacttaaggcttagctagaggatgat

SEQ ID NO: 835 - DNA, 320 bp, unidentified
  source 1..320: mol_type = other DNA
cacgtgctctagctaagccttaagttggtttttggttccgttgctccccaaacccctttctcgatcattattattttttgcggcgatcggcttttttttttttttttgttgagaatggtgctagtggtagtgaacagttttttttttttttttgccgatcgccgctttttttttttttttttttttggggtttggggagcaacggaaccaaaaaccaacttaaggcttagctagagcacgtgttttttttttttttttttttgacgaatactctagctaagccttaagttggtttttggttccgttgctccccaaacccc

SEQ ID NO: 836 - DNA, 4757 bp, unidentified; identical to SEQ ID NO: 812
  source 1..4757: mol_type = other DNA

SEQ ID NO: 837 - DNA, 320 bp, unidentified
  source 1..320: mol_type = other DNA
cacgtgctctagctaagccttaagttggtttttggttccgttgctccccaaacccctttctcgatcattattattttttgcggcgatcggcttttttttttttttttagcaaattggtaatactcctgcctccacagttttttttttttttttgccgatcgccgctttttttttttttttttttttggggtttggggagcaacggaaccaaaaaccaacttaaggcttagctagagcacgtgttttttttttttttttttttcagctatactctagctaagccttaagttggtttttggttccgttgctccccaaacccc

SEQ ID NO: 838 - DNA, 317 bp, unidentified
  source 1..317: mol_type = other DNA
ggggtttggggagcaacggaaccaaaaaccaacttaaggcttagctagagagtatgaatttttttttttttttttatcatcctctagctaagccttaagttggtttttggttccgttgctccccaaaccccttttttttttttttttttttttgcggcgatcggcttttttttttttttttccttctcctctaaatcattaccttctataattttttttttttttttgccgatcgccgctttttttttttttgatacatttggggtttggggagcaacggaaccaaaaaccaacttaaggcttagctagaggatgat

SEQ ID NO: 839 - DNA, 4756 bp, unidentified; identical to SEQ ID NO: 815
  source 1..4756: mol_type = other DNA

SEQ ID NO: 840 - DNA, 317 bp, unidentified
  source 1..317: mol_type = other DNA
ctctagctaagccttaagttggtttttggttccgttgctccccaaaccccgtagtgtatttttttttttttttttatcatcggggtttggggagcaacggaaccaaaaaccaacttaaggcttagctagagttttttttttttttttttttttgcggcgatcggcttttttttttttttttgctagaaagagtactgttctggaaactgacttttttttttttttttgccgatcgccgctttttttttttttgatacatttctctagctaagccttaagttggtttttggttccgttgctccccaaaccccgatgat

SEQ ID NO: 841 - DNA, 320 bp, unidentified
  source 1..320: mol_type = other DNA
cacgtgggggtttggggagcaacggaaccaaaaaccaacttaaggcttagctagagtttctcgatcattattattttttgcggcgatcggcttttttttttttttttgttgagaatggtgctagtggtagtgaacagttttttttttttttttgccgatcgccgctttttttttttttttttttttctctagctaagccttaagttggtttttggttccgttgctccccaaacccccacgtgttttttttttttttttttttgacgaataggggtttggggagcaacggaaccaaaaaccaacttaaggcttagctagag

SEQ ID NO: 842 - DNA, 4757 bp, unidentified; identical to SEQ ID NO: 818
  source 1..4757: mol_type = other DNA

SEQ ID NO: 843 - DNA, 320 bp, unidentified
  source 1..320: mol_type = other DNA
cacgtgggggtttggggagcaacggaaccaaaaaccaacttaaggcttagctagagtttctcgatcattattattttttgcggcgatcggcttttttttttttttttagcaaattggtaatactcctgcctccacagttttttttttttttttgccgatcgccgctttttttttttttttttttttctctagctaagccttaagttggtttttggttccgttgctccccaaacccccacgtgttttttttttttttttttttcagctataggggtttggggagcaacggaaccaaaaaccaacttaaggcttagctagag

SEQ ID NO: 844 - DNA, 317 bp, unidentified
  source 1..317: mol_type = other DNA
ctctagctaagccttaagttggtttttggttccgttgctccccaaaccccagtatgaatttttttttttttttttatcatcggggtttggggagcaacggaaccaaaaaccaacttaaggcttagctagagttttttttttttttttttttttgcggcgatcggcttttttttttttttttccttctcctctaaatcattaccttctataattttttttttttttttgccgatcgccgctttttttttttttgatacatttctctagctaagccttaagttggtttttggttccgttgctccccaaaccccgatgat

SEQ ID NO: 845 - DNA, 4756 bp, unidentified; identical to SEQ ID NO: 821
  source 1..4756: mol_type = other DNA

SEQ ID NO: 846 - DNA, 311 bp, unidentified; identical to SEQ ID NO: 774
  source 1..311: mol_type = other DNA

SEQ ID NO: 847 - DNA, 314 bp, unidentified; identical to SEQ ID NO: 775
  source 1..314: mol_type = other DNA

SEQ ID NO: 848 - DNA, 4757 bp, unidentified; identical to SEQ ID NO: 776
  source 1..4757: mol_type = other DNA

SEQ ID NO: 849 - DNA, 314 bp, unidentified; identical to SEQ ID NO: 777
  source 1..314: mol_type = other DNA

SEQ ID NO: 850 - DNA, 311 bp, unidentified; identical to SEQ ID NO: 778
  source 1..311: mol_type = other DNA

SEQ ID NO: 851 - DNA, 4756 bp, unidentified; identical to SEQ ID NO: 779
  source 1..4756: mol_type = other DNA

SEQ ID NO: 852 - DNA, 311 bp, unidentified; identical to SEQ ID NO: 780
  source 1..311: mol_type = other DNA

SEQ ID NO: 853 - DNA, 314 bp, unidentified; identical to SEQ ID NO: 781
  source 1..314: mol_type = other DNA

SEQ ID NO: 854 - DNA, 4757 bp, unidentified; identical to SEQ ID NO: 782
  source 1..4757: mol_type = other DNA

SEQ ID NO: 855 - DNA, 314 bp, unidentified; identical to SEQ ID NO: 783
  source 1..314: mol_type = other DNA

SEQ ID NO: 856 - DNA, 311 bp, unidentified; identical to SEQ ID NO: 784
  source 1..311: mol_type = other DNA

SEQ ID NO: 857 - DNA, 4756 bp, unidentified; identical to SEQ ID NO: 785
  source 1..4756: mol_type = other DNA

SEQ ID NO: 858 - DNA, 305 bp, unidentified; identical to SEQ ID NO: 786
  source 1..305: mol_type = other DNA

SEQ ID NO: 859 - DNA, 307 bp, unidentified; identical to SEQ ID NO: 787
  source 1..307: mol_type = other DNA

SEQ ID NO: 860 - DNA, 4757 bp, unidentified; identical to SEQ ID NO: 776
  source 1..4757: mol_type = other DNA

SEQ ID NO: 861 - DNA, 308 bp, unidentified; identical to SEQ ID NO: 789
  source 1..308: mol_type = other DNA

SEQ ID NO: 862 - DNA, 305 bp, unidentified; identical to SEQ ID NO: 790
  source 1..305: mol_type = other DNA

SEQ ID NO: 863 - DNA, 4756 bp, unidentified; identical to SEQ ID NO: 779
  source 1..4756: mol_type = other DNA

SEQ ID NO: 864 - DNA, 305 bp, unidentified; identical to SEQ ID NO: 792
  source 1..305: mol_type = other DNA

SEQ ID NO: 865 - DNA, 308 bp, unidentified; identical to SEQ ID NO: 793
  source 1..308: mol_type = other DNA

SEQ ID NO: 866 - DNA, 4757 bp, unidentified; identical to SEQ ID NO: 782
  source 1..4757: mol_type = other DNA

SEQ ID NO: 867 - DNA, 308 bp, unidentified; identical to SEQ ID NO: 795
  source 1..308: mol_type = other DNA

SEQ ID NO: 868 - DNA, 305 bp, unidentified; identical to SEQ ID NO: 796
  source 1..305: mol_type = other DNA

SEQ ID NO: 869 - DNA, 4756 bp, unidentified; identical to SEQ ID NO: 785
  source 1..4756: mol_type = other DNA

SEQ ID NO: 870 - DNA, 317 bp, unidentified; identical to SEQ ID NO: 798
  source 1..317: mol_type = other DNA

SEQ ID NO: 871 - DNA, 320 bp, unidentified; identical to SEQ ID NO: 799
  source 1..320: mol_type = other DNA

SEQ ID NO: 872 - DNA, 4757 bp, unidentified; identical to SEQ ID NO: 776
  source 1..4757: mol_type = other DNA

SEQ ID NO: 873 - DNA, 320 bp, unidentified; identical to SEQ ID NO: 801
  source 1..320: mol_type = other DNA

SEQ ID NO: 874 - DNA, 317 bp, unidentified; identical to SEQ ID NO: 802
  source 1..317: mol_type = other DNA

SEQ ID NO: 875 - DNA, 4756 bp, unidentified; identical to SEQ ID NO: 779
  source 1..4756: mol_type = other DNA

SEQ ID NO: 876 - DNA, 317 bp, unidentified; identical to SEQ ID NO: 804
  source 1..317: mol_type = other DNA

SEQ ID NO: 877 - DNA, 320 bp, unidentified; identical to SEQ ID NO: 805
  source 1..320: mol_type = other DNA

SEQ ID NO: 878 - DNA, 4757 bp, unidentified; identical to SEQ ID NO: 782
  source 1..4757: mol_type = other DNA

SEQ ID NO: 879 - DNA, 320 bp, unidentified; identical to SEQ ID NO: 807
  source 1..320: mol_type = other DNA

SEQ ID NO: 880 - DNA, 317 bp, unidentified; identical to SEQ ID NO: 808
  source 1..317: mol_type = other DNA

SEQ ID NO: 881 - DNA, 4756 bp, unidentified; identical to SEQ ID NO: 785
  source 1..4756: mol_type = other DNA

SEQ ID NO: 882 - DNA, 218 bp, unidentified
  source 1..218: mol_type = other DNA
acttgtgtataagagtcaggtagtgtatttttttttttttttttatcatcctgactcttatacacaagtttttttttttttttttttttttggcgatcgcttttttttttttttttgctagaaagagtactgttctggaaactgacttttttttttttttttgcgatcgcctttttttttttttgatacatttacttgtgtataagagtcaggatgat

SEQ ID NO: 883 - DNA, 221 bp, unidentified
  source 1..221: mol_type = other DNA
cacgtgctgactcttatacacaagttttctcgatcattattattttttggcgatcgcttttttttttttttttgttgagaatggtgctagtggtagtgaacagttttttttttttttttgcgatcgcctttttttttttttttttttttacttgtgtataagagtcagcacgtgttttttttttttttttttttgacgaatactgactcttatacacaagt

SEQ ID NO: 884 - DNA, 4695 bp, unidentified
  source 1..4695: mol_type = other DNA
tacactacctgactcttatacacaagtttttttttttttttttttttttggttacatgcatcagtcaataatgctttttttattttttttatttttttagatgcctccacagcatgaatgtactactcctttttcttcccctcccaccctcattgcatcccaggcttcccctgctccccacccccatgacagacatttttgatgattatcaacagaaactttatttctcatcggttcaggaacaatcggagggtagatggaaagaggaagggagggaaagagggagggaggaagaatcctgcgaaaaggaagggccagactgagggagaagaaaaacatgttcggggcaaaagggtaattctcaagtggggaatgccaaatgaaggggtgcttacatgggggcacaaaattccaaatcagccacagtggggtgaggtgagtatgagacgcaggtgggttgaatgaaggaaagttagtaccacttagggctacaggaccctggggttcttctgtcagaggattggggttcaggtttcaggctttagggtgtaacatgggggggcccagtaggggctatgctggttgcatggggaggccccaggcccctccccaagggcccctccttttgggggaatctcactgacgaggcagagtcgttcactgtagtctggctgcagactctcagccagtcccttagacacaccactccaggcctaaagacagatatgtccaggtcaggggtcaattaggggcaggaagtaaaagaccgagctctgtgccaaaggagtactcatgatgtctgcaaccactgtaattgattacagaagggatacacaggctcctgggcccccaataccagttgccatctgcctcattcaatctataatctgcacttctgtgtgtgtctctctctgtatagtccatgccccatttggtcggccacatcctgacagttagtgcagggcctccttccctctcctctctgcccccacccccacactctgtctgtcttgctggcaggcagttggcagttgatagactgcagcatgcttatgacagcgttctcaccgaaaagttcccgtggtattcagtaacaagatcctctaggttcttcagggtgggaattcggggcatcgtcctgacaggggagaaagagggagcaggagcacataggttaaagcttttttatcacccttctcccagttgtcccatatgaaataaagtgattctgtgttctctgtgcctgtggcttccttccatcaccaaaccctcttgggtaatctctcattacttactgtctcatcctttactcctaaagaccctgcaaaaccctcctctgctattgtcagctaccgttcccctcatttttctgggcttctccaaatctcaccgttccagccagaaatacacacagagaaggctgataatcaatcccatggagccaacagagataaccacggcttccaatgcaaacaggaaaggattctctatagaaaaaagaaaagcaaagtggaccttatatttgttgtgcccctactacatgccaggcactggtgccaggcaccgcgctaaagacatactctctgtttaatcctcacaacagctcctgtgaggcaggaacaattacctccatcttacatcttaggaaacagaatccaagagtttagggatgtggccaaggccaaagaggtagtatgtggcacagcctagatccagctggttccaaagccatcttcaccttgcaggctctctaggaatgcttcagggaaatcctatacattctatagcccccttgagtacccctcagcctccttctcaatccactcccctactctaacaacacgctaacccaaccctacacagaaaaaccttgatttctagaggttggggttagacagtgtggagagatggggcaccaagtttaggggctttagtgacagggaagtggagcaaaagacagtggtgttagaaaggctggggtgttgggctcatggattgggtcatgtgggcccattttaccttttgaagtattgctcccccagtggattgggtggctccattcactccaatgctgagcacttccacagagtgggttaaagcggctccgaacacgaaacgtgtagcgtttctgcccatccacactaggcaaggagaacttatgtctataatccactgattgttccttgaggagaaagaggatgagggaaagtgggtgtctatgagagaagggagaattaaaacatactcctgaacacccaccagtgtcatctctgctactgcccagtttctctctcatctcttgactactcaagccacactgctcccttcactgacttgaatctaatgcctcccctctggatccccttaatggcttccttttgtttacttgtctatctggtatcaggaagagtatgggtagggaatccctaatgaaaactcactggtgtcaggaatggtggctcacgcctgtaatcccagcactttgggaggccgaggtgggcagatcacctgaggtcaggagttcaagaccagcctgaccaacatggcaaaaccctgtctttactaaaaatacaaaaattagccaggcatggttgtgcatgctcccagctacttgggaggctgaagcaggagaatcacttgaaccagggagacagaggtcgcagtgagcccaagatcgccccactgcactcaagcctgggcaacagagtgaggctctgtctcaaaaaaaaaaaaaaaagaaagaaagaaagaaaagaaaagaaaaaaagaaaactcactggagaaaataggggggaaaggagttggaggagggagggtagggggtgagcagagaagctgggaggcagagaacaggagcttgatattaggtccttctatctgtctggttgaatcctttagccctactttcttggccttagctgctacattcacgtccctagtcactcacagtccagctgtggtcccagtcagtccggtactgcaccaagtgctccaaacagtggttcaagaatctgttgttccagttcagttctagctgggattcactcagtttgtgaagtgttaggttctctggagcccaggggatcactggagatatgtgtgcatatgtggtcattcccctggcctagacaagtcaggatcctgaaggtagtgcccctaatacctcctcccttcccatcatgatcccctacctcctcttttctgcccatgtacccttatgataaaagaacactactctgtagactccaatgtcccacagtatccctggtctcttgaccctttctttccaaattacccagattctgcagttttagcatctgtgtggcctgtctcctgggttcccgtgggtcctggagctgaacaacaaatgtttggtagaggtggatctcctttttttgcaactgacagccagaagtgatttcttcagagaatagatagtggctgcacttctggactttatcattatccgagttcttgtacctagaggagaaaggttggaaggaagaggaacagtggggccaatctgggtactgcagatatccagagcctagcctcatctcccctcaaccgacttatgacttaccccaggagaaaacagtggggtacctgggagacttgctaccctctctcttggtctctgatccaacccacctcttcttcatcccctccccctcgtcccttctcataccaataatgcagagtgaggttggtaggctggggctcagagctgctgttccaagtgcaattcatgtactcgacattgaacacaaaacactgaacctctgggaggggcagagtggaaacactgagggagtcagtgggcatagtggtcaggaagaaatctagattggggagaaaatgaaggcagggagggaaagagaaatgatggtcagaaggaggaggccaagcacggtggctcatgtctgtaatcctggtgctttgaaaggctgaggcaggaggatcactagaggccaggagtttgagaccagcctaggcaacatagtgagaccctgcctcaaaagaaagaaagaaacaaacaaacaagaaagaaagaaagaagaagtagcgtgaggcagggaaccctcccccttgcccttcccactccacttttcaattctgcccacatgattgtaatggccagtggcaggcaccagatctctgtacggccccttcccacagccacccttctcaccagccccctccagtcccagatttcccaccagctgtggtgtcttcattcccattgggcgtcagaattgtcgtgttcagccccactcccagcaggggcagctgcaggaataagagggatgtgaatggtaatgatggcttcaacatggcgcttgctcttcattccctgggtgtagtctgtctgtgtcaggaacctgggtccctcacccactacccctccccacccacacgtttcctctgtcatagcttccggtggaaagaaccttataaaccagggctttacagagggtgtggcaaatatgtgctgtgtgacacgggctaagtcctctaggagattaggtgctgctgtaaggtggtaaacagaaactaaagctggatatacaatagtgtcacagactcaaaaatcctcagcccacctagatcctgggaaggatctgttcactgcggccgcatgttctttttttttttttttttttttttacttgtgtataagagtcagtattcgtc

SEQ ID NO: 885 - DNA, 221 bp, unidentified
  source 1..221: mol_type = other DNA
cacgtgctgactcttatacacaagttttctcgatcattattattttttggcgatcgcttttttttttttttttagcaaattggtaatactcctgcctccacagttttttttttttttttgcgatcgcctttttttttttttttttttttacttgtgtataagagtcagcacgtgttttttttttttttttttttcagctatactgactcttatacacaagt

SEQ ID NO: 886 - DNA, 218 bp, unidentified
  source 1..218: mol_type = other DNA
acttgtgtataagagtcagagtatgaatttttttttttttttttatcatcctgactcttatacacaagtttttttttttttttttttttttggcgatcgcttttttttttttttttccttctcctctaaatcattaccttctataattttttttttttttttgcgatcgcctttttttttttttgatacatttacttgtgtataagagtcaggatgat

SEQ ID NO: 887 - DNA, 4694 bp, unidentified
  source 1..4694: mol_type = other DNA
ttcatactctgactcttatacacaagtttttttttttttttttttttttgaacatgcggccgcgtgaacagatccttcccaggatctaggtgggctgaggatttttgagtctgtgacactattgtatatccagctttagtttctgtttaccaccttacagcagcacctaatctcctagaggacttagcccgtgtcacacagcacatatttgccacaccctctgtaaagccctggtttataaggttctttccaccggaagctatgacagaggaaacgtgtgggtggggaggggtagtgggtgagggacccaggttcctgacacagacagactacacccagggaatgaagagcaagcgccatgttgaagccatcattaccattcacatccctcttattcctgcagctgcccctgctgggagtggggctgaacacgacaattctgacgcccaatgggaatgaagacaccacagctggtgggaaatctgggactggagggggctggtgagaagggtggctgtgggaaggggccgtacagagatctggtgcctgccactggccattacaatcatgtgggcagaattgaaaagtggagtgggaagggcaagggggagggttccctgcctcacgctacttcttctttctttctttcttgtttgtttgtttctttctttcttttgaggcagggtctcactatgttgcctaggctggtctcaaactcctggcctctagtgatcctcctgcctcagcctttcaaagcaccaggattacagacatgagccaccgtgcttggcctcctccttctgaccatcatttctctttccctccctgccttcattttctccccaatctagatttcttcctgaccactatgcccactgactccctcagtgtttccactctgcccctcccagaggttcagtgttttgtgttcaatgtcgagtacatgaattgcacttggaacagcagctctgagccccagcctaccaacctcactctgcattattggtatgagaagggacgagggggaggggatgaagaagaggtgggttggatcagagaccaagagagagggtagcaagtctcccaggtaccccactgttttctcctggggtaagtcataagtcggttgaggggagatgaggctaggctctggatatctgcagtacccagattggccccactgttcctcttccttccaacctttctcctctaggtacaagaactcggataatgataaagtccagaagtgcagccactatctattctctgaagaaatcacttctggctgtcagttgcaaaaaaaggagatccacctctaccaaacatttgttgttcagctccaggacccacgggaacccaggagacaggccacacagatgctaaaactgcagaatctgggtaatttggaaagaaagggtcaagagaccagggatactgtgggacattggagtctacagagtagtgttcttttatcataagggtacatgggcagaaaagaggaggtaggggatcatgatgggaagggaggaggtattaggggcactaccttcaggatcctgacttgtctaggccaggggaatgaccacatatgcacacatatctccagtgatcccctgggctccagagaacctaacacttcacaaactgagtgaatcccagctagaactgaactggaacaacagattcttgaaccactgtttggagcacttggtgcagtaccggactgactgggaccacagctggactgtgagtgactagggacgtgaatgtagcagctaaggccaagaaagtagggctaaaggattcaaccagacagatagaaggacctaatatcaagctcctgttctctgcctcccagcttctctgctcaccccctaccctccctcctccaactcctttcccccctattttctccagtgagttttctttttttcttttcttttctttctttctttcttttttttttttttttgagacagagcctcactctgttgcccaggcttgagtgcagtggggcgatcttgggctcactgcgacctctgtctccctggttcaagtgattctcctgcttcagcctcccaagtagctgggagcatgcacaaccatgcctggctaatttttgtatttttagtaaagacagggttttgccatgttggtcaggctggtcttgaactcctgacctcaggtgatctgcccacctcggcctcccaaagtgctgggattacaggcgtgagccaccattcctgacaccagtgagttttcattagggattccctacccatactcttcctgataccagatagacaagtaaacaaaaggaagccattaaggggatccagaggggaggcattagattcaagtcagtgaagggagcagtgtggcttgagtagtcaagagatgagagagaaactgggcagtagcagagatgacactggtgggtgttcaggagtatgttttaattctcccttctctcatagacacccactttccctcatcctctttctcctcaaggaacaatcagtggattatagacataagttctccttgcctagtgtggatgggcagaaacgctacacgtttcgtgttcggagccgctttaacccactctgtggaagtgctcagcattggagtgaatggagccacccaatccactgggggagcaatacttcaaaaggtaaaatgggcccacatgacccaatccatgagcccaacaccccagcctttctaacaccactgtcttttgctccacttccctgtcactaaagcccctaaacttggtgccccatctctccacactgtctaaccccaacctctagaaatcaaggtttttctgtgtagggttgggttagcgtgttgttagagtaggggagtggattgagaaggaggctgaggggtactcaagggggctatagaatgtataggatttccctgaagcattcctagagagcctgcaaggtgaagatggctttggaaccagctggatctaggctgtgccacatactacctctttggccttggccacatccctaaactcttggattctgtttcctaagatgtaagatggaggtaattgttcctgcctcacaggagctgttgtgaggattaaacagagagtatgtctttagcgcggtgcctggcaccagtgcctggcatgtagtaggggcacaacaaatataaggtccactttgcttttcttttttctatagagaatcctttcctgtttgcattggaagccgtggttatctctgttggctccatgggattgattatcagccttctctgtgtgtatttctggctggaacggtgagatttggagaagcccagaaaaatgaggggaacggtagctgacaatagcagaggagggttttgcagggtctttaggagtaaaggatgagacagtaagtaatgagagattacccaagagggtttggtgatggaaggaagccacaggcacagagaacacagaatcactttatttcatatgggacaactgggagaagggtgataaaaaagctttaacctatgtgctcctgctccctctttctcccctgtcaggacgatgccccgaattcccaccctgaagaacctagaggatcttgttactgaataccacgggaacttttcggtgagaacgctgtcataagcatgctgcagtctatcaactgccaactgcctgccagcaagacagacagagtgtgggggtgggggcagagaggagagggaaggaggccctgcactaactgtcaggatgtggccgaccaaatggggcatggactatacagagagagacacacacagaagtgcagattatagattgaatgaggcagatggcaactggtattgggggcccaggagcctgtgtatcccttctgtaatcaattacagtggttgcagacatcatgagtactcctttggcacagagctcggtcttttacttcctgcccctaattgacccctgacctggacatatctgtctttaggcctggagtggtgtgtctaagggactggctgagagtctgcagccagactacagtgaacgactctgcctcgtcagtgagattcccccaaaaggaggggcccttggggaggggcctggggcctccccatgcaaccagcatagcccctactgggcccccccatgttacaccctaaagcctgaaacctgaaccccaatcctctgacagaagaaccccagggtcctgtagccctaagtggtactaactttccttcattcaacccacctgcgtctcatactcacctcaccccactgtggctgatttggaattttgtgcccccatgtaagcaccccttcatttggcattccccacttgagaattacccttttgccccgaacatgtttttcttctccctcagtctggcccttccttttcgcaggattcttcctccctccctctttccctcccttcctctttccatctaccctccgattgttcctgaaccgatgagaaataaagtttctgttgataatcatcaaaaatgtctgtcatgggggtggggagcaggggaagcctgggatgcaatgagggtgggaggggaagaaaaaggagtagtacattcatgctgtggaggcatctaaaaaaataaaaaaaataaaaaaagcattattgactgatgcatgtaacctttttttttttttttttttttttacttgtgtataagagtcagtatagctg

SEQ ID NO: 888 - DNA, 218 bp, unidentified
  source 1..218: mol_type = other DNA
ctgactcttatacacaagtgtagtgtatttttttttttttttttatcatcacttgtgtataagagtcagttttttttttttttttttttttggcgatcgcttttttttttttttttgctagaaagagtactgttctggaaactgacttttttttttttttttgcgatcgcctttttttttttttgatacatttctgactcttatacacaagtgatgat

SEQ ID NO: 889 - DNA, 221 bp, unidentified
  source 1..221: mol_type = other DNA
cacgtgacttgtgtataagagtcagtttctcgatcattattattttttggcgatcgcttttttttttttttttgttgagaatggtgctagtggtagtgaacagttttttttttttttttgcgatcgcctttttttttttttttttttttctgactcttatacacaagtcacgtgttttttttttttttttttttgacgaataacttgtgtataagagtcag

SEQ ID NO: 890 - DNA, 4695 bp, unidentified
  source 1..4695: mol_type = other DNA
tacactacacttgtgtataagagtcagttttttttttttttttttttttggttacatgcatcagtcaataatgctttttttattttttttatttttttagatgcctccacagcatgaatgtactactcctttttcttcccctcccaccctcattgcatcccaggcttcccctgctccccacccccatgacagacatttttgatgattatcaacagaaactttatttctcatcggttcaggaacaatcggagggtagatggaaagaggaagggagggaaagagggagggaggaagaatcctgcgaaaaggaagggccagactgagggagaagaaaaacatgttcggggcaaaagggtaattctcaagtggggaatgccaaatgaaggggtgcttacatgggggcacaaaattccaaatcagccacagtggggtgaggtgagtatgagacgcaggtgggttgaatgaaggaaagttagtaccacttagggctacaggaccctggggttcttctgtcagaggattggggttcaggtttcaggctttagggtgtaacatgggggggcccagtaggggctatgctggttgcatggggaggccccaggcccctccccaagggcccctccttttgggggaatctcactgacgaggcagagtcgttcactgtagtctggctgcagactctcagccagtcccttagacacaccactccaggcctaaagacagatatgtccaggtcaggggtcaattaggggcaggaagtaaaagaccgagctctgtgccaaaggagtactcatgatgtctgcaaccactgtaattgattacagaagggatacacaggctcctgggcccccaataccagttgccatctgcctcattcaatctataatctgcacttctgtgtgtgtctctctctgtatagtccatgccccatttggtcggccacatcctgacagttagtgcagggcctccttccctctcctctctgcccccacccccacactctgtctgtcttgctggcaggcagttggcagttgatagactgcagcatgcttatgacagcgttctcaccgaaaagttcccgtggtattcagtaacaagatcctctaggttcttcagggtgggaattcggggcatcgtcctgacaggggagaaagagggagcaggagcacataggttaaagcttttttatcacccttctcccagttgtcccatatgaaataaagtgattctgtgttctctgtgcctgtggcttccttccatcaccaaaccctcttgggtaatctctcattacttactgtctcatcctttactcctaaagaccctgcaaaaccctcctctgctattgtcagctaccgttcccctcatttttctgggcttctccaaatctcaccgttccagccagaaatacacacagagaaggctgataatcaatcccatggagccaacagagataaccacggcttccaatgcaaacaggaaaggattctctatagaaaaaagaaaagcaaagtggaccttatatttgttgtgcccctactacatgccaggcactggtgccaggcaccgcgctaaagacatactctctgtttaatcctcacaacagctcctgtgaggcaggaacaattacctccatcttacatcttaggaaacagaatccaagagtttagggatgtggccaaggccaaagaggtagtatgtggcacagcctagatccagctggttccaaagccatcttcaccttgcaggctctctaggaatgcttcagggaaatcctatacattctatagcccccttgagtacccctcagcctccttctcaatccactcccctactctaacaacacgctaacccaaccctacacagaaaaaccttgatttctagaggttggggttagacagtgtggagagatggggcaccaagtttaggggctttagtgacagggaagtggagcaaaagacagtggtgttagaaaggctggggtgttgggctcatggattgggtcatgtgggcccattttaccttttgaagtattgctcccccagtggattgggtggctccattcactccaatgctgagcacttccacagagtgggttaaagcggctccgaacacgaaacgtgtagcgtttctgcccatccacactaggcaaggagaacttatgtctataatccactgattgttccttgaggagaaagaggatgagggaaagtgggtgtctatgagagaagggagaattaaaacatactcctgaacacccaccagtgtcatctctgctactgcccagtttctctctcatctcttgactactcaagccacactgctcccttcactgacttgaatctaatgcctcccctctggatccccttaatggcttccttttgtttacttgtctatctggtatcaggaagagtatgggtagggaatccctaatgaaaactcactggtgtcaggaatggtggctcacgcctgtaatcccagcactttgggaggccgaggtgggcagatcacctgaggtcaggagttcaagaccagcctgaccaacatggcaaaaccctgtctttactaaaaatacaaaaattagccaggcatggttgtgcatgctcccagctacttgggaggctgaagcaggagaatcacttgaaccagggagacagaggtcgcagtgagcccaagatcgccccactgcactcaagcctgggcaacagagtgaggctctgtctcaaaaaaaaaaaaaaaagaaagaaagaaagaaaagaaaagaaaaaaagaaaactcactggagaaaataggggggaaaggagttggaggagggagggtagggggtgagcagagaagctgggaggcagagaacaggagcttgatattaggtccttctatctgtctggttgaatcctttagccctactttcttggccttagctgctacattcacgtccctagtcactcacagtccagctgtggtcccagtcagtccggtactgcaccaagtgctccaaacagtggttcaagaatctgttgttccagttcagttctagctgggattcactcagtttgtgaagtgttaggttctctggagcccaggggatcactggagatatgtgtgcatatgtggtcattcccctggcctagacaagtcaggatcctgaaggtagtgcccctaatacctcctcccttcccatcatgatcccctacctcctcttttctgcccatgtacccttatgataaaagaacactactctgtagactccaatgtcccacagtatccctggtctcttgaccctttctttccaaattacccagattctgcagttttagcatctgtgtggcctgtctcctgggttcccgtgggtcctggagctgaacaacaaatgtttggtagaggtggatctcctttttttgcaactgacagccagaagtgatttcttcagagaatagatagtggctgcacttctggactttatcattatccgagttcttgtacctagaggagaaaggttggaaggaagaggaacagtggggccaatctgggtactgcagatatccagagcctagcctcatctcccctcaaccgacttatgacttaccccaggagaaaacagtggggtacctgggagacttgctaccctctctcttggtctctgatccaacccacctcttcttcatcccctccccctcgtcccttctcataccaataatgcagagtgaggttggtaggctggggctcagagctgctgttccaagtgcaattcatgtactcgacattgaacacaaaacactgaacctctgggaggggcagagtggaaacactgagggagtcagtgggcatagtggtcaggaagaaatctagattggggagaaaatgaaggcagggagggaaagagaaatgatggtcagaaggaggaggccaagcacggtggctcatgtctgtaatcctggtgctttgaaaggctgaggcaggaggatcactagaggccaggagtttgagaccagcctaggcaacatagtgagaccctgcctcaaaagaaagaaagaaacaaacaaacaagaaagaaagaaagaagaagtagcgtgaggcagggaaccctcccccttgcccttcccactccacttttcaattctgcccacatgattgtaatggccagtggcaggcaccagatctctgtacggccccttcccacagccacccttctcaccagccccctccagtcccagatttcccaccagctgtggtgtcttcattcccattgggcgtcagaattgtcgtgttcagccccactcccagcaggggcagctgcaggaataagagggatgtgaatggtaatgatggcttcaacatggcgcttgctcttcattccctgggtgtagtctgtctgtgtcaggaacctgggtccctcacccactacccctccccacccacacgtttcctctgtcatagcttccggtggaaagaaccttataaaccagggctttacagagggtgtggcaaatatgtgctgtgtgacacgggctaagtcctctaggagattaggtgctgctgtaaggtggtaaacagaaactaaagctggatatacaatagtgtcacagactcaaaaatcctcagcccacctagatcctgggaaggatctgttcactgcggccgcatgttctttttttttttttttttttttttctgactcttatacacaagttattcgtc

SEQ ID NO: 891 - DNA, 221 bp, unidentified
  source 1..221: mol_type = other DNA
cacgtgacttgtgtataagagtcagtttctcgatcattattattttttggcgatcgcttttttttttttttttagcaaattggtaatactcctgcctccacagttttttttttttttttgcgatcgcctttttttttttttttttttttctgactcttatacacaagtcacgtgttttttttttttttttttttcagctataacttgtgtataagagtcag

SEQ ID NO: 892 - DNA, 218 bp, unidentified
  source 1..218: mol_type = other DNA
ctgactcttatacacaagtagtatgaatttttttttttttttttatcatcacttgtgtataagagtcagttttttttttttttttttttttggcgatcgcttttttttttttttttccttctcctctaaatcattaccttctataattttttttttttttttgcgatcgcctttttttttttttgatacatttctgactcttatacacaagtgatgat

SEQ ID NO: 893 - DNA, 4694 bp, unidentified
  source 1..4694: mol_type = other DNA
ttcatactacttgtgtataagagtcagttttttttttttttttttttttgaacatgcggccgcgtgaacagatccttcccaggatctaggtgggctgaggatttttgagtctgtgacactattgtatatccagctttagtttctgtttaccaccttacagcagcacctaatctcctagaggacttagcccgtgtcacacagcacatatttgccacaccctctgtaaagccctggtttataaggttctttccaccggaagctatgacagaggaaacgtgtgggtggggaggggtagtgggtgagggacccaggttcctgacacagacagactacacccagggaatgaagagcaagcgccatgttgaagccatcattaccattcacatccctcttattcctgcagctgcccctgctgggagtggggctgaacacgacaattctgacgcccaatgggaatgaagacaccacagctggtgggaaatctgggactggagggggctggtgagaagggtggctgtgggaaggggccgtacagagatctggtgcctgccactggccattacaatcatgtgggcagaattgaaaagtggagtgggaagggcaagggggagggttccctgcctcacgctacttcttctttctttctttcttgtttgtttgtttctttctttcttttgaggcagggtctcactatgttgcctaggctggtctcaaactcctggcctctagtgatcctcctgcctcagcctttcaaagcaccaggattacagacatgagccaccgtgcttggcctcctccttctgaccatcatttctctttccctccctgccttcattttctccccaatctagatttcttcctgaccactatgcccactgactccctcagtgtttccactctgcccctcccagaggttcagtgttttgtgttcaatgtcgagtacatgaattgcacttggaacagcagctctgagccccagcctaccaacctcactctgcattattggtatgagaagggacgagggggaggggatgaagaagaggtgggttggatcagagaccaagagagagggtagcaagtctcccaggtaccccactgttttctcctggggtaagtcataagtcggttgaggggagatgaggctaggctctggatatctgcagtacccagattggccccactgttcctcttccttccaacctttctcctctaggtacaagaactcggataatgataaagtccagaagtgcagccactatctattctctgaagaaatcacttctggctgtcagttgcaaaaaaaggagatccacctctaccaaacatttgttgttcagctccaggacccacgggaacccaggagacaggccacacagatgctaaaactgcagaatctgggtaatttggaaagaaagggtcaagagaccagggatactgtgggacattggagtctacagagtagtgttcttttatcataagggtacatgggcagaaaagaggaggtaggggatcatgatgggaagggaggaggtattaggggcactaccttcaggatcctgacttgtctaggccaggggaatgaccacatatgcacacatatctccagtgatcccctgggctccagagaacctaacacttcacaaactgagtgaatcccagctagaactgaactggaacaacagattcttgaaccactgtttggagcacttggtgcagtaccggactgactgggaccacagctggactgtgagtgactagggacgtgaatgtagcagctaaggccaagaaagtagggctaaaggattcaaccagacagatagaaggacctaatatcaagctcctgttctctgcctcccagcttctctgctcaccccctaccctccctcctccaactcctttcccccctattttctccagtgagttttctttttttcttttcttttctttctttctttcttttttttttttttttgagacagagcctcactctgttgcccaggcttgagtgcagtggggcgatcttgggctcactgcgacctctgtctccctggttcaagtgattctcctgcttcagcctcccaagtagctgggagcatgcacaaccatgcctggctaatttttgtatttttagtaaagacagggttttgccatgttggtcaggctggtcttgaactcctgacctcaggtgatctgcccacctcggcctcccaaagtgctgggattacaggcgtgagccaccattcctgacaccagtgagttttcattagggattccctacccatactcttcctgataccagatagacaagtaaacaaaaggaagccattaaggggatccagaggggaggcattagattcaagtcagtgaagggagcagtgtggcttgagtagtcaagagatgagagagaaactgggcagtagcagagatgacactggtgggtgttcaggagtatgttttaattctcccttctctcatagacacccactttccctcatcctctttctcctcaaggaacaatcagtggattatagacataagttctccttgcctagtgtggatgggcagaaacgctacacgtttcgtgttcggagccgctttaacccactctgtggaagtgctcagcattggagtgaatggagccacccaatccactgggggagcaatacttcaaaaggtaaaatgggcccacatgacccaatccatgagcccaacaccccagcctttctaacaccactgtcttttgctccacttccctgtcactaaagcccctaaacttggtgccccatctctccacactgtctaaccccaacctctagaaatcaaggtttttctgtgtagggttgggttagcgtgttgttagagtaggggagtggattgagaaggaggctgaggggtactcaagggggctatagaatgtataggatttccctgaagcattcctagagagcctgcaaggtgaagatggctttggaaccagctggatctaggctgtgccacatactacctctttggccttggccacatccctaaactcttggattctgtttcctaagatgtaagatggaggtaattgttcctgcctcacaggagctgttgtgaggattaaacagagagtatgtctttagcgcggtgcctggcaccagtgcctggcatgtagtaggggcacaacaaatataaggtccactttgcttttcttttttctatagagaatcctttcctgtttgcattggaagccgtggttatctctgttggctccatgggattgattatcagccttctctgtgtgtatttctggctggaacggtgagatttggagaagcccagaaaaatgaggggaacggtagctgacaatagcagaggagggttttgcagggtctttaggagtaaaggatgagacagtaagtaatgagagattacccaagagggtttggtgatggaaggaagccacaggcacagagaacacagaatcactttatttcatatgggacaactgggagaagggtgataaaaaagctttaacctatgtgctcctgctccctctttctcccctgtcaggacgatgccccgaattcccaccctgaagaacctagaggatcttgttactgaataccacgggaacttttcggtgagaacgctgtcataagcatgctgcagtctatcaactgccaactgcctgccagcaagacagacagagtgtgggggtgggggcagagaggagagggaaggaggccctgcactaactgtcaggatgtggccgaccaaatggggcatggactatacagagagagacacacacagaagtgcagattatagattgaatgaggcagatggcaactggtattgggggcccaggagcctgtgtatcccttctgtaatcaattacagtggttgcagacatcatgagtactcctttggcacagagctcggtcttttacttcctgcccctaattgacccctgacctggacatatctgtctttaggcctggagtggtgtgtctaagggactggctgagagtctgcagccagactacagtgaacgactctgcctcgtcagtgagattcccccaaaaggaggggcccttggggaggggcctggggcctccccatgcaaccagcatagcccctactgggcccccccatgttacaccctaaagcctgaaacctgaaccccaatcctctgacagaagaaccccagggtcctgtagccctaagtggtactaactttccttcattcaacccacctgcgtctcatactcacctcaccccactgtggctgatttggaattttgtgcccccatgtaagcaccccttcatttggcattccccacttgagaattacccttttgccccgaacatgtttttcttctccctcagtctggcccttccttttcgcaggattcttcctccctccctctttccctcccttcctctttccatctaccctccgattgttcctgaaccgatgagaaataaagtttctgttgataatcatcaaaaatgtctgtcatgggggtggggagcaggggaagcctgggatgcaatgagggtgggaggggaagaaaaaggagtagtacattcatgctgtggaggcatctaaaaaaataaaaaaaataaaaaaagcattattgactgatgcatgtaacctttttttttttttttttttttttctgactcttatacacaagttatagctg

SEQ ID NO: 894 - DNA, 212 bp, unidentified
  source 1..212: mol_type = other DNA
acttgtgtataagagtcaggtagtgtatttttttttttttttttatcatcctgactcttatacacaagtttttttttttttttttttttttgcgaccttttttttttttttttgctagaaagagtactgttctggaaactgacttttttttttttttttggtcgctttttttttttttgatacatttacttgtgtataagagtcaggatgat

SEQ ID NO: 895 - DNA, 214 bp, unidentified
  source 1..214: mol_type = other DNA
cacgtgctgactcttatacacaagttttctcgatcattattattttttgcgaccttttttttttttttttgttgagaatggtgctagtggtagtgaacagtttttttttttttttggtcgctttttttttttttttttttttacttgtgtataagagtcagcacgtgttttttttttttttttttttgacgaatactgactcttatacacaagt

SEQ ID NO: 896 - DNA, 4695 bp, unidentified; identical to SEQ ID NO: 884
  source 1..4695: mol_type = other DNA

SEQ ID NO: 897 - DNA, 215 bp, unidentified
  source 1..215: mol_type = other DNA
cacgtgctgactcttatacacaagttttctcgatcattattattttttgcgaccttttttttttttttttagcaaattggtaatactcctgcctccacagttttttttttttttttggtcgctttttttttttttttttttttacttgtgtataagagtcagcacgtgttttttttttttttttttttcagctatactgactcttatacacaagt

SEQ ID NO: 898 - DNA, 212 bp, unidentified
  source 1..212: mol_type = other DNA
acttgtgtataagagtcagagtatgaatttttttttttttttttatcatcctgactcttatacacaagtttttttttttttttttttttttgcgaccttttttttttttttttccttctcctctaaatcattaccttctataattttttttttttttttggtcgctttttttttttttgatacatttacttgtgtataagagtcaggatgat

SEQ ID NO: 899 - DNA, 4694 bp, unidentified; identical to SEQ ID NO: 887
  source 1..4694: mol_type = other DNA

SEQ ID NO: 900 - DNA, 212 bp, unidentified
  source 1..212: mol_type = other DNA
ctgactcttatacacaagtgtagtgtatttttttttttttttttatcatcacttgtgtataagagtcagttttttttttttttttttttttgcgaccttttttttttttttttgctagaaagagtactgttctggaaactgacttttttttttttttttggtcgctttttttttttttgatacatttctgactcttatacacaagtgatgat

SEQ ID NO: 901 - DNA, 215 bp, unidentified
  source 1..215: mol_type = other DNA
cacgtgacttgtgtataagagtcagtttctcgatcattattattttttgcgaccttttttttttttttttgttgagaatggtgctagtggtagtgaacagttttttttttttttttggtcgctttttttttttttttttttttctgactcttatacacaagtcacgtgttttttttttttttttttttgacgaataacttgtgtataagagtcag

SEQ ID NO: 902 - DNA, 4695 bp, unidentified; identical to SEQ ID NO: 890
  source 1..4695: mol_type = other DNA

SEQ ID NO: 903 - DNA, 215 bp, unidentified
  source 1..215: mol_type = other DNA
cacgtgacttgtgtataagagtcagtttctcgatcattattattttttgcgaccttttttttttttttttagcaaattggtaatactcctgcctccacagttttttttttttttttggtcgctttttttttttttttttttttctgactcttatacacaagtcacgtgttttttttttttttttttttcagctataacttgtgtataagagtcag

SEQ ID NO: 904 - DNA, 212 bp, unidentified
  source 1..212: mol_type = other DNA
ctgactcttatacacaagtagtatgaatttttttttttttttttatcatcacttgtgtataagagtcagttttttttttttttttttttttgcgaccttttttttttttttttccttctcctctaaatcattaccttctataattttttttttttttttggtcgctttttttttttttgatacatttctgactcttatacacaagtgatgat

SEQ ID NO: 905 - DNA, 4694 bp, unidentified; identical to SEQ ID NO: 893
  source 1..4694: mol_type = other DNA

SEQ ID NO: 906 - DNA, 224 bp, unidentified
  source 1..224: mol_type = other DNA
acttgtgtataagagtcaggtagtgtatttttttttttttttttatcatcctgactcttatacacaagtttttttttttttttttttttttgcggcgatcggcttttttttttttttttgctagaaagagtactgttctggaaactgacttttttttttttttttgccgatcgccgctttttttttttttgatacatttacttgtgtataagagtcaggatgat

SEQ ID NO: 907 - DNA, 227 bp, unidentified
  source 1..227: mol_type = other DNA
cacgtgctgactcttatacacaagttttctcgatcattattattttttgcggcgatcggcttttttttttttttttgttgagaatggtgctagtggtagtgaacagttttttttttttttttgccgatcgccgctttttttttttttttttttttacttgtgtataagagtcagcacgtgttttttttttttttttttttgacgaatactgactcttatacacaagt

SEQ ID NO: 908 - DNA, 4695 bp, unidentified; identical to SEQ ID NO: 884
  source 1..4695: mol_type = other DNA

SEQ ID NO: 909 - DNA, 227 bp, unidentified
  source 1..227: mol_type = other DNA
cacgtgctgactcttatacacaagttttctcgatcattattattttttgcggcgatcggcttttttttttttttttagcaaattggtaatactcctgcctccacagttttttttttttttttgccgatcgccgctttttttttttttttttttttacttgtgtataagagtcagcacgtgttttttttttttttttttttcagctatactgactcttatacacaagt

SEQ ID NO: 910 - DNA, 224 bp, unidentified
  source 1..224: mol_type = other DNA
acttgtgtataagagtcagagtatgaatttttttttttttttttatcatcctgactcttatacacaagtttttttttttttttttttttttgcggcgatcggcttttttttttttttttccttctcctctaaatcattaccttctataattttttttttttttttgccgatcgccgctttttttttttttgatacatttacttgtgtataagagtcaggatgat

SEQ ID NO: 911 - DNA, 4694 bp, unidentified; identical to SEQ ID NO: 887
  source 1..4694: mol_type = other DNA

SEQ ID NO: 912 - DNA, 224 bp, unidentified
  source 1..224: mol_type = other DNA
ctgactcttatacacaagtgtagtgtatttttttttttttttttatcatcacttgtgtataagagtcagttttttttttttttttttttttgcggcgatcggcttttttttttttttttgctagaaagagtactgttctggaaactgacttttttttttttttttgccgatcgccgctttttttttttttgatacatttctgactcttatacacaagtgatgat

SEQ ID NO: 913 - DNA, 227 bp, unidentified
  source 1..227: mol_type = other DNA
cacgtgacttgtgtataagagtcagtttctcgatcattattattttttgcggcgatcggcttttttttttttttttgttgagaatggtgctagtggtagtgaacagttttttttttttttttgccgatcgccgctttttttttttttttttttttctgactcttatacacaagtcacgtgttttttttttttttttttttgacgaataacttgtgtataagagtcag

SEQ ID NO: 914 - DNA, 4695 bp, unidentified; identical to SEQ ID NO: 890
  source 1..4695: mol_type = other DNA

SEQ ID NO: 915 - DNA, 227 bp, unidentified
  source 1..227: mol_type = other DNA
cacgtgacttgtgtataagagtcagtttctcgatcattattattttttgcggcgatcggcttttttttttttttttagcaaattggtaatactcctgcctccacagttttttttttttttttgccgatcgccgctttttttttttttttttttttctgactcttatacacaagtcacgtgttttttttttttttttttttcagctataacttgtgtataagagtcag

SEQ ID NO: 916 - DNA, 224 bp, unidentified
  source 1..224: mol_type = other DNA
ctgactcttatacacaagtagtatgaatttttttttttttttttatcatcacttgtgtataagagtcagttttttttttttttttttttttgcggcgatcggcttttttttttttttttccttctcctctaaatcattaccttctataattttttttttttttttgccgatcgccgctttttttttttttgatacatttctgactcttatacacaagtgatgat

SEQ ID NO: 917 - DNA, 4694 bp, unidentified; identical to SEQ ID NO: 893
  source 1..4694: mol_type = other DNA

SEQ ID NO: 918 - DNA, 218 bp, unidentified
  source 1..218: mol_type = other DNA
agatctgatcaagagacaggtagtgtatttttttttttttttttatcatcctgtctcttgatcagatctttttttttttttttttttttttggcgatcgcttttttttttttttttgctagaaagagtactgttctggaaactgacttttttttttttttttgcgatcgcctttttttttttttgatacatttagatctgatcaagagacaggatgat

SEQ ID NO: 919 - DNA, 221 bp, unidentified
  source 1..221: mol_type = other DNA
cacgtgctgtctcttgatcagatcttttctcgatcattattattttttggcgatcgcttttttttttttttttgttgagaatggtgctagtggtagtgaacagttttttttttttttttgcgatcgcctttttttttttttttttttttagatctgatcaagagacagcacgtgttttttttttttttttttttgacgaatactgtctcttgatcagatct

SEQ ID NO: 920 - DNA, 4695 bp, unidentified
  source 1..4695: mol_type = other DNA
tacactacctgtctcttgatcagatctttttttttttttttttttttttggttacatgcatcagtcaataatgctttttttattttttttatttttttagatgcctccacagcatgaatgtactactcctttttcttcccctcccaccctcattgcatcccaggcttcccctgctccccacccccatgacagacatttttgatgattatcaacagaaactttatttctcatcggttcaggaacaatcggagggtagatggaaagaggaagggagggaaagagggagggaggaagaatcctgcgaaaaggaagggccagactgagggagaagaaaaacatgttcggggcaaaagggtaattctcaagtggggaatgccaaatgaaggggtgcttacatgggggcacaaaattccaaatcagccacagtggggtgaggtgagtatgagacgcaggtgggttgaatgaaggaaagttagtaccacttagggctacaggaccctggggttcttctgtcagaggattggggttcaggtttcaggctttagggtgtaacatgggggggcccagtaggggctatgctggttgcatggggaggccccaggcccctccccaagggcccctccttttgggggaatctcactgacgaggcagagtcgttcactgtagtctggctgcagactctcagccagtcccttagacacaccactccaggcctaaagacagatatgtccaggtcaggggtcaattaggggcaggaagtaaaagaccgagctctgtgccaaaggagtactcatgatgtctgcaaccactgtaattgattacagaagggatacacaggctcctgggcccccaataccagttgccatctgcctcattcaatctataatctgcacttctgtgtgtgtctctctctgtatagtccatgccccatttggtcggccacatcctgacagttagtgcagggcctccttccctctcctctctgcccccacccccacactctgtctgtcttgctggcaggcagttggcagttgatagactgcagcatgcttatgacagcgttctcaccgaaaagttcccgtggtattcagtaacaagatcctctaggttcttcagggtgggaattcggggcatcgtcctgacaggggagaaagagggagcaggagcacataggttaaagcttttttatcacccttctcccagttgtcccatatgaaataaagtgattctgtgttctctgtgcctgtggcttccttccatcaccaaaccctcttgggtaatctctcattacttactgtctcatcctttactcctaaagaccctgcaaaaccctcctctgctattgtcagctaccgttcccctcatttttctgggcttctccaaatctcaccgttccagccagaaatacacacagagaaggctgataatcaatcccatggagccaacagagataaccacggcttccaatgcaaacaggaaaggattctctatagaaaaaagaaaagcaaagtggaccttatatttgttgtgcccctactacatgccaggcactggtgccaggcaccgcgctaaagacatactctctgtttaatcctcacaacagctcctgtgaggcaggaacaattacctccatcttacatcttaggaaacagaatccaagagtttagggatgtggccaaggccaaagaggtagtatgtggcacagcctagatccagctggttccaaagccatcttcaccttgcaggctctctaggaatgcttcagggaaatcctatacattctatagcccccttgagtacccctcagcctccttctcaatccactcccctactctaacaacacgctaacccaaccctacacagaaaaaccttgatttctagaggttggggttagacagtgtggagagatggggcaccaagtttaggggctttagtgacagggaagtggagcaaaagacagtggtgttagaaaggctggggtgttgggctcatggattgggtcatgtgggcccattttaccttttgaagtattgctcccccagtggattgggtggctccattcactccaatgctgagcacttccacagagtgggttaaagcggctccgaacacgaaacgtgtagcgtttctgcccatccacactaggcaaggagaacttatgtctataatccactgattgttccttgaggagaaagaggatgagggaaagtgggtgtctatgagagaagggagaattaaaacatactcctgaacacccaccagtgtcatctctgctactgcccagtttctctctcatctcttgactactcaagccacactgctcccttcactgacttgaatctaatgcctcccctctggatccccttaatggcttccttttgtttacttgtctatctggtatcaggaagagtatgggtagggaatccctaatgaaaactcactggtgtcaggaatggtggctcacgcctgtaatcccagcactttgggaggccgaggtgggcagatcacctgaggtcaggagttcaagaccagcctgaccaacatggcaaaaccctgtctttactaaaaatacaaaaattagccaggcatggttgtgcatgctcccagctacttgggaggctgaagcaggagaatcacttgaaccagggagacagaggtcgcagtgagcccaagatcgccccactgcactcaagcctgggcaacagagtgaggctctgtctcaaaaaaaaaaaaaaaagaaagaaagaaagaaaagaaaagaaaaaaagaaaactcactggagaaaataggggggaaaggagttggaggagggagggtagggggtgagcagagaagctgggaggcagagaacaggagcttgatattaggtccttctatctgtctggttgaatcctttagccctactttcttggccttagctgctacattcacgtccctagtcactcacagtccagctgtggtcccagtcagtccggtactgcaccaagtgctccaaacagtggttcaagaatctgttgttccagttcagttctagctgggattcactcagtttgtgaagtgttaggttctctggagcccaggggatcactggagatatgtgtgcatatgtggtcattcccctggcctagacaagtcaggatcctgaaggtagtgcccctaatacctcctcccttcccatcatgatcccctacctcctcttttctgcccatgtacccttatgataaaagaacactactctgtagactccaatgtcccacagtatccctggtctcttgaccctttctttccaaattacccagattctgcagttttagcatctgtgtggcctgtctcctgggttcccgtgggtcctggagctgaacaacaaatgtttggtagaggtggatctcctttttttgcaactgacagccagaagtgatttcttcagagaatagatagtggctgcacttctggactttatcattatccgagttcttgtacctagaggagaaaggttggaaggaagaggaacagtggggccaatctgggtactgcagatatccagagcctagcctcatctcccctcaaccgacttatgacttaccccaggagaaaacagtggggtacctgggagacttgctaccctctctcttggtctctgatccaacccacctcttcttcatcccctccccctcgtcccttctcataccaataatgcagagtgaggttggtaggctggggctcagagctgctgttccaagtgcaattcatgtactcgacattgaacacaaaacactgaacctctgggaggggcagagtggaaacactgagggagtcagtgggcatagtggtcaggaagaaatctagattggggagaaaatgaaggcagggagggaaagagaaatgatggtcagaaggaggaggccaagcacggtggctcatgtctgtaatcctggtgctttgaaaggctgaggcaggaggatcactagaggccaggagtttgagaccagcctaggcaacatagtgagaccctgcctcaaaagaaagaaagaaacaaacaaacaagaaagaaagaaagaagaagtagcgtgaggcagggaaccctcccccttgcccttcccactccacttttcaattctgcccacatgattgtaatggccagtggcaggcaccagatctctgtacggccccttcccacagccacccttctcaccagccccctccagtcccagatttcccaccagctgtggtgtcttcattcccattgggcgtcagaattgtcgtgttcagccccactcccagcaggggcagctgcaggaataagagggatgtgaatggtaatgatggcttcaacatggcgcttgctcttcattccctgggtgtagtctgtctgtgtcaggaacctgggtccctcacccactacccctccccacccacacgtttcctctgtcatagcttccggtggaaagaaccttataaaccagggctttacagagggtgtggcaaatatgtgctgtgtgacacgggctaagtcctctaggagattaggtgctgctgtaaggtggtaaacagaaactaaagctggatatacaatagtgtcacagactcaaaaatcctcagcccacctagatcctgggaaggatctgttcactgcggccgcatgttctttttttttttttttttttttttagatctgatcaagagacagtattcgtc

SEQ ID NO: 921 - DNA, 221 bp, unidentified
  source 1..221: mol_type = other DNA
cacgtgctgtctcttgatcagatcttttctcgatcattattattttttggcgatcgcttttttttttttttttagcaaattggtaatactcctgcctccacagttttttttttttttttgcgatcgcctttttttttttttttttttttagatctgatcaagagacagcacgtgttttttttttttttttttttcagctatactgtctcttgatcagatct

SEQ ID NO: 922 - DNA, 218 bp, unidentified
  source 1..218: mol_type = other DNA
agatctgatcaagagacagagtatgaatttttttttttttttttatcatcctgtctcttgatcagatctttttttttttttttttttttttggcgatcgcttttttttttttttttccttctcctctaaatcattaccttctataattttttttttttttttgcgatcgcctttttttttttttgatacatttagatctgatcaagagacaggatgat

SEQ ID NO: 923 - DNA, 4694 bp, unidentified
  source 1..4694: mol_type = other DNA
ttcatactctgtctcttgatcagatctttttttttttttttttttttttgaacatgcggccgcgtgaacagatccttcccaggatctaggtgggctgaggatttttgagtctgtgacactattgtatatccagctttagtttctgtttaccaccttacagcagcacctaatctcctagaggacttagcccgtgtcacacagcacatatttgccacaccctctgtaaagccctggtttataaggttctttccaccggaagctatgacagaggaaacgtgtgggtggggaggggtagtgggtgagggacccaggttcctgacacagacagactacacccagggaatgaagagcaagcgccatgttgaagccatcattaccattcacatccctcttattcctgcagctgcccctgctgggagtggggctgaacacgacaattctgacgcccaatgggaatgaagacaccacagctggtgggaaatctgggactggagggggctggtgagaagggtggctgtgggaaggggccgtacagagatctggtgcctgccactggccattacaatcatgtgggcagaattgaaaagtggagtgggaagggcaagggggagggttccctgcctcacgctacttcttctttctttctttcttgtttgtttgtttctttctttcttttgaggcagggtctcactatgttgcctaggctggtctcaaactcctggcctctagtgatcctcctgcctcagcctttcaaagcaccaggattacagacatgagccaccgtgcttggcctcctccttctgaccatcatttctctttccctccctgccttcattttctccccaatctagatttcttcctgaccactatgcccactgactccctcagtgtttccactctgcccctcccagaggttcagtgttttgtgttcaatgtcgagtacatgaattgcacttggaacagcagctctgagccccagcctaccaacctcactctgcattattggtatgagaagggacgagggggaggggatgaagaagaggtgggttggatcagagaccaagagagagggtagcaagtctcccaggtaccccactgttttctcctggggtaagtcataagtcggttgaggggagatgaggctaggctctggatatctgcagtacccagattggccccactgttcctcttccttccaacctttctcctctaggtacaagaactcggataatgataaagtccagaagtgcagccactatctattctctgaagaaatcacttctggctgtcagttgcaaaaaaaggagatccacctctaccaaacatttgttgttcagctccaggacccacgggaacccaggagacaggccacacagatgctaaaactgcagaatctgggtaatttggaaagaaagggtcaagagaccagggatactgtgggacattggagtctacagagtagtgttcttttatcataagggtacatgggcagaaaagaggaggtaggggatcatgatgggaagggaggaggtattaggggcactaccttcaggatcctgacttgtctaggccaggggaatgaccacatatgcacacatatctccagtgatcccctgggctccagagaacctaacacttcacaaactgagtgaatcccagctagaactgaactggaacaacagattcttgaaccactgtttggagcacttggtgcagtaccggactgactgggaccacagctggactgtgagtgactagggacgtgaatgtagcagctaaggccaagaaagtagggctaaaggattcaaccagacagatagaaggacctaatatcaagctcctgttctctgcctcccagcttctctgctcaccccctaccctccctcctccaactcctttcccccctattttctccagtgagttttctttttttcttttcttttctttctttctttcttttttttttttttttgagacagagcctcactctgttgcccaggcttgagtgcagtggggcgatcttgggctcactgcgacctctgtctccctggttcaagtgattctcctgcttcagcctcccaagtagctgggagcatgcacaaccatgcctggctaatttttgtatttttagtaaagacagggttttgccatgttggtcaggctggtcttgaactcctgacctcaggtgatctgcccacctcggcctcccaaagtgctgggattacaggcgtgagccaccattcctgacaccagtgagttttcattagggattccctacccatactcttcctgataccagatagacaagtaaacaaaaggaagccattaaggggatccagaggggaggcattagattcaagtcagtgaagggagcagtgtggcttgagtagtcaagagatgagagagaaactgggcagtagcagagatgacactggtgggtgttcaggagtatgttttaattctcccttctctcatagacacccactttccctcatcctctttctcctcaaggaacaatcagtggattatagacataagttctccttgcctagtgtggatgggcagaaacgctacacgtttcgtgttcggagccgctttaacccactctgtggaagtgctcagcattggagtgaatggagccacccaatccactgggggagcaatacttcaaaaggtaaaatgggcccacatgacccaatccatgagcccaacaccccagcctttctaacaccactgtcttttgctccacttccctgtcactaaagcccctaaacttggtgccccatctctccacactgtctaaccccaacctctagaaatcaaggtttttctgtgtagggttgggttagcgtgttgttagagtaggggagtggattgagaaggaggctgaggggtactcaagggggctatagaatgtataggatttccctgaagcattcctagagagcctgcaaggtgaagatggctttggaaccagctggatctaggctgtgccacatactacctctttggccttggccacatccctaaactcttggattctgtttcctaagatgtaagatggaggtaattgttcctgcctcacaggagctgttgtgaggattaaacagagagtatgtctttagcgcggtgcctggcaccagtgcctggcatgtagtaggggcacaacaaatataaggtccactttgcttttcttttttctatagagaatcctttcctgtttgcattggaagccgtggttatctctgttggctccatgggattgattatcagccttctctgtgtgtatttctggctggaacggtgagatttggagaagcccagaaaaatgaggggaacggtagctgacaatagcagaggagggttttgcagggtctttaggagtaaaggatgagacagtaagtaatgagagattacccaagagggtttggtgatggaaggaagccacaggcacagagaacacagaatcactttatttcatatgggacaactgggagaagggtgataaaaaagctttaacctatgtgctcctgctccctctttctcccctgtcaggacgatgccccgaattcccaccctgaagaacctagaggatcttgttactgaataccacgggaacttttcggtgagaacgctgtcataagcatgctgcagtctatcaactgccaactgcctgccagcaagacagacagagtgtgggggtgggggcagagaggagagggaaggaggccctgcactaactgtcaggatgtggccgaccaaatggggcatggactatacagagagagacacacacagaagtgcagattatagattgaatgaggcagatggcaactggtattgggggcccaggagcctgtgtatcccttctgtaatcaattacagtggttgcagacatcatgagtactcctttggcacagagctcggtcttttacttcctgcccctaattgacccctgacctggacatatctgtctttaggcctggagtggtgtgtctaagggactggctgagagtctgcagccagactacagtgaacgactctgcctcgtcagtgagattcccccaaaaggaggggcccttggggaggggcctggggcctccccatgcaaccagcatagcccctactgggcccccccatgttacaccctaaagcctgaaacctgaaccccaatcctctgacagaagaaccccagggtcctgtagccctaagtggtactaactttccttcattcaacccacctgcgtctcatactcacctcaccccactgtggctgatttggaattttgtgcccccatgtaagcaccccttcatttggcattccccacttgagaattacccttttgccccgaacatgtttttcttctccctcagtctggcccttccttttcgcaggattcttcctccctccctctttccctcccttcctctttccatctaccctccgattgttcctgaaccgatgagaaataaagtttctgttgataatcatcaaaaatgtctgtcatgggggtggggagcaggggaagcctgggatgcaatgagggtgggaggggaagaaaaaggagtagtacattcatgctgtggaggcatctaaaaaaataaaaaaaataaaaaaagcattattgactgatgcatgtaacctttttttttttttttttttttttagatctgatcaagagacagtatagctg

SEQ ID NO: 924 - DNA, 218 bp, unidentified
  source 1..218: mol_type = other DNA
ctgtctcttgatcagatctgtagtgtatttttttttttttttttatcatcagatctgatcaagagacagttttttttttttttttttttttggcgatcgcttttttttttttttttgctagaaagagtactgttctggaaactgacttttttttttttttttgcgatcgcctttttttttttttgatacatttctgtctcttgatcagatctgatgat

SEQ ID NO: 925 - DNA, 221 bp, unidentified
  source 1..221: mol_type = other DNA
cacgtgagatctgatcaagagacagtttctcgatcattattattttttggcgatcgcttttttttttttttttgttgagaatggtgctagtggtagtgaacagttttttttttttttttgcgatcgcctttttttttttttttttttttctgtctcttgatcagatctcacgtgttttttttttttttttttttgacgaataagatctgatcaagagacag

SEQ ID NO: 926 - DNA, 4695 bp, unidentified
  source 1..4695: mol_type = other DNA
tacactacagatctgatcaagagacagttttttttttttttttttttttggttacatgcatcagtcaataatgctttttttattttttttatttttttagatgcctccacagcatgaatgtactactcctttttcttcccctcccaccctcattgcatcccaggcttcccctgctccccacccccatgacagacatttttgatgattatcaacagaaactttatttctcatcggttcaggaacaatcggagggtagatggaaagaggaagggagggaaagagggagggaggaagaatcctgcgaaaaggaagggccagactgagggagaagaaaaacatgttcggggcaaaagggtaattctcaagtggggaatgccaaatgaaggggtgcttacatgggggcacaaaattccaaatcagccacagtggggtgaggtgagtatgagacgcaggtgggttgaatgaaggaaagttagtaccacttagggctacaggaccctggggttcttctgtcagaggattggggttcaggtttcaggctttagggtgtaacatgggggggcccagtaggggctatgctggttgcatggggaggccccaggcccctccccaagggcccctccttttgggggaatctcactgacgaggcagagtcgttcactgtagtctggctgcagactctcagccagtcccttagacacaccactccaggcctaaagacagatatgtccaggtcaggggtcaattaggggcaggaagtaaaagaccgagctctgtgccaaaggagtactcatgatgtctgcaaccactgtaattgattacagaagggatacacaggctcctgggcccccaataccagttgccatctgcctcattcaatctataatctgcacttctgtgtgtgtctctctctgtatagtccatgccccatttggtcggccacatcctgacagttagtgcagggcctccttccctctcctctctgcccccacccccacactctgtctgtcttgctggcaggcagttggcagttgatagactgcagcatgcttatgacagcgttctcaccgaaaagttcccgtggtattcagtaacaagatcctctaggttcttcagggtgggaattcggggcatcgtcctgacaggggagaaagagggagcaggagcacataggttaaagcttttttatcacccttctcccagttgtcccatatgaaataaagtgattctgtgttctctgtgcctgtggcttccttccatcaccaaaccctcttgggtaatctctcattacttactgtctcatcctttactcctaaagaccctgcaaaaccctcctctgctattgtcagctaccgttcccctcatttttctgggcttctccaaatctcaccgttccagccagaaatacacacagagaaggctgataatcaatcccatggagccaacagagataaccacggcttccaatgcaaacaggaaaggattctctatagaaaaaagaaaagcaaagtggaccttatatttgttgtgcccctactacatgccaggcactggtgccaggcaccgcgctaaagacatactctctgtttaatcctcacaacagctcctgtgaggcaggaacaattacctccatcttacatcttaggaaacagaatccaagagtttagggatgtggccaaggccaaagaggtagtatgtggcacagcctagatccagctggttccaaagccatcttcaccttgcaggctctctaggaatgcttcagggaaatcctatacattctatagcccccttgagtacccctcagcctccttctcaatccactcccctactctaacaacacgctaacccaaccctacacagaaaaaccttgatttctagaggttggggttagacagtgtggagagatggggcaccaagtttaggggctttagtgacagggaagtggagcaaaagacagtggtgttagaaaggctggggtgttgggctcatggattgggtcatgtgggcccattttaccttttgaagtattgctcccccagtggattgggtggctccattcactccaatgctgagcacttccacagagtgggttaaagcggctccgaacacgaaacgtgtagcgtttctgcccatccacactaggcaaggagaacttatgtctataatccactgattgttccttgaggagaaagaggatgagggaaagtgggtgtctatgagagaagggagaattaaaacatactcctgaacacccaccagtgtcatctctgctactgcccagtttctctctcatctcttgactactcaagccacactgctcccttcactgacttgaatctaatgcctcccctctggatccccttaatggcttccttttgtttacttgtctatctggtatcaggaagagtatgggtagggaatccctaatgaaaactcactggtgtcaggaatggtggctcacgcctgtaatcccagcactttgggaggccgaggtgggcagatcacctgaggtcaggagttcaagaccagcctgaccaacatggcaaaaccctgtctttactaaaaatacaaaaattagccaggcatggttgtgcatgctcccagctacttgggaggctgaagcaggagaatcacttgaaccagggagacagaggtcgcagtgagcccaagatcgccccactgcactcaagcctgggcaacagagtgaggctctgtctcaaaaaaaaaaaaaaaagaaagaaagaaagaaaagaaaagaaaaaaagaaaactcactggagaaaataggggggaaaggagttggaggagggagggtagggggtgagcagagaagctgggaggcagagaacaggagcttgatattaggtccttctatctgtctggttgaatcctttagccctactttcttggccttagctgctacattcacgtccctagtcactcacagtccagctgtggtcccagtcagtccggtactgcaccaagtgctccaaacagtggttcaagaatctgttgttccagttcagttctagctgggattcactcagtttgtgaagtgttaggttctctggagcccaggggatcactggagatatgtgtgcatatgtggtcattcccctggcctagacaagtcaggatcctgaaggtagtgcccctaatacctcctcccttcccatcatgatcccctacctcctcttttctgcccatgtacccttatgataaaagaacactactctgtagactccaatgtcccacagtatccctggtctcttgaccctttctttccaaattacccagattctgcagttttagcatctgtgtggcctgtctcctgggttcccgtgggtcctggagctgaacaacaaatgtttggtagaggtggatctcctttttttgcaactgacagccagaagtgatttcttcagagaatagatagtggctgcacttctggactttatcattatccgagttcttgtacctagaggagaaaggttggaaggaagaggaacagtggggccaatctgggtactgcagatatccagagcctagcctcatctcccctcaaccgacttatgacttaccccaggagaaaacagtggggtacctgggagacttgctaccctctctcttggtctctgatccaacccacctcttcttcatcccctccccctcgtcccttctcataccaataatgcagagtgaggttggtaggctggggctcagagctgctgttccaagtgcaattcatgtactcgacattgaacacaaaacactgaacctctgggaggggcagagtggaaacactgagggagtcagtgggcatagtggtcaggaagaaatctagattggggagaaaatgaaggcagggagggaaagagaaatgatggtcagaaggaggaggccaagcacggtggctcatgtctgtaatcctggtgctttgaaaggctgaggcaggaggatcactagaggccaggagtttgagaccagcctaggcaacatagtgagaccctgcctcaaaagaaagaaagaaacaaacaaacaagaaagaaagaaagaagaagtagcgtgaggcagggaaccctcccccttgcccttcccactccacttttcaattctgcccacatgattgtaatggccagtggcaggcaccagatctctgtacggccccttcccacagccacccttctcaccagccccctccagtcccagatttcccaccagctgtggtgtcttcattcccattgggcgtcagaattgtcgtgttcagccccactcccagcaggggcagctgcaggaataagagggatgtgaatggtaatgatggcttcaacatggcgcttgctcttcattccctgggtgtagtctgtctgtgtcaggaacctgggtccctcacccactacccctccccacccacacgtttcctctgtcatagcttccggtggaaagaaccttataaaccagggctttacagagggtgtggcaaatatgtgctgtgtgacacgggctaagtcctctaggagattaggtgctgctgtaaggtggtaaacagaaactaaagctggatatacaatagtgtcacagactcaaaaatcctcagcccacctagatcctgggaaggatctgttcactgcggccgcatgttctttttttttttttttttttttttctgtctcttgatcagatcttattcgtc

SEQ ID NO: 927 - DNA, 221 bp, unidentified
  source 1..221: mol_type = other DNA
cacgtgagatctgatcaagagacagtttctcgatcattattattttttggcgatcgcttttttttttttttttagcaaattggtaatactcctgcctccacagttttttttttttttttgcgatcgcctttttttttttttttttttttctgtctcttgatcagatctcacgtgttttttttttttttttttttcagctataagatctgatcaagagacag

SEQ ID NO: 928 - DNA, 218 bp, unidentified
  source 1..218: mol_type = other DNA
ctgtctcttgatcagatctagtatgaatttttttttttttttttatcatcagatctgatcaagagacagttttttttttttttttttttttggcgatcgcttttttttttttttttccttctcctctaaatcattaccttctataattttttttttttttttgcgatcgcctttttttttttttgatacatttctgtctcttgatcagatctgatgat

SEQ ID NO: 929 - DNA, 4694 bp, unidentified
  source 1..4694: mol_type = other DNA
ttcatactagatctgatcaagagacagttttttttttttttttttttttgaacatgcggccgcgtgaacagatccttcccaggatctaggtgggctgaggatttttgagtctgtgacactattgtatatccagctttagtttctgtttaccaccttacagcagcacctaatctcctagaggacttagcccgtgtcacacagcacatatttgccacaccctctgtaaagccctggtttataaggttctttccaccggaagctatgacagaggaaacgtgtgggtggggaggggtagtgggtgagggacccaggttcctgacacagacagactacacccagggaatgaagagcaagcgccatgttgaagccatcattaccattcacatccctcttattcctgcagctgcccctgctgggagtggggctgaacacgacaattctgacgcccaatgggaatgaagacaccacagctggtgggaaatctgggactggagggggctggtgagaagggtggctgtgggaaggggccgtacagagatctggtgcctgccactggccattacaatcatgtgggcagaattgaaaagtggagtgggaagggcaagggggagggttccctgcctcacgctacttcttctttctttctttcttgtttgtttgtttctttctttcttttgaggcagggtctcactatgttgcctaggctggtctcaaactcctggcctctagtgatcctcctgcctcagcctttcaaagcaccaggattacagacatgagccaccgtgcttggcctcctccttctgaccatcatttctctttccctccctgccttcattttctccccaatctagatttcttcctgaccactatgcccactgactccctcagtgtttccactctgcccctcccagaggttcagtgttttgtgttcaatgtcgagtacatgaattgcacttggaacagcagctctgagccccagcctaccaacctcactctgcattattggtatgagaagggacgagggggaggggatgaagaagaggtgggttggatcagagaccaagagagagggtagcaagtctcccaggtaccccactgttttctcctggggtaagtcataagtcggttgaggggagatgaggctaggctctggatatctgcagtacccagattggccccactgttcctcttccttccaacctttctcctctaggtacaagaactcggataatgataaagtccagaagtgcagccactatctattctctgaagaaatcacttctggctgtcagttgcaaaaaaaggagatccacctctaccaaacatttgttgttcagctccaggacccacgggaacccaggagacaggccacacagatgctaaaactgcagaatctgggtaatttggaaagaaagggtcaagagaccagggatactgtgggacattggagtctacagagtagtgttcttttatcataagggtacatgggcagaaaagaggaggtaggggatcatgatgggaagggaggaggtattaggggcactaccttcaggatcctgacttgtctaggccaggggaatgaccacatatgcacacatatctccagtgatcccctgggctccagagaacctaacacttcacaaactgagtgaatcccagctagaactgaactggaacaacagattcttgaaccactgtttggagcacttggtgcagtaccggactgactgggaccacagctggactgtgagtgactagggacgtgaatgtagcagctaaggccaagaaagtagggctaaaggattcaaccagacagatagaaggacctaatatcaagctcctgttctctgcctcccagcttctctgctcaccccctaccctccctcctccaactcctttcccccctattttctccagtgagttttctttttttcttttcttttctttctttctttcttttttttttttttttgagacagagcctcactctgttgcccaggcttgagtgcagtggggcgatcttgggctcactgcgacctctgtctccctggttcaagtgattctcctgcttcagcctcccaagtagctgggagcatgcacaaccatgcctggctaatttttgtatttttagtaaagacagggttttgccatgttggtcaggctggtcttgaactcctgacctcaggtgatctgcccacctcggcctcccaaagtgctgggattacaggcgtgagccaccattcctgacaccagtgagttttcattagggattccctacccatactcttcctgataccagatagacaagtaaacaaaaggaagccattaaggggatccagaggggaggcattagattcaagtcagtgaagggagcagtgtggcttgagtagtcaagagatgagagagaaactgggcagtagcagagatgacactggtgggtgttcaggagtatgttttaattctcccttctctcatagacacccactttccctcatcctctttctcctcaaggaacaatcagtggattatagacataagttctccttgcctagtgtggatgggcagaaacgctacacgtttcgtgttcggagccgctttaacccactctgtggaagtgctcagcattggagtgaatggagccacccaatccactgggggagcaatacttcaaaaggtaaaatgggcccacatgacccaatccatgagcccaacaccccagcctttctaacaccactgtcttttgctccacttccctgtcactaaagcccctaaacttggtgccccatctctccacactgtctaaccccaacctctagaaatcaaggtttttctgtgtagggttgggttagcgtgttgttagagtaggggagtggattgagaaggaggctgaggggtactcaagggggctatagaatgtataggatttccctgaagcattcctagagagcctgcaaggtgaagatggctttggaaccagctggatctaggctgtgccacatactacctctttggccttggccacatccctaaactcttggattctgtttcctaagatgtaagatggaggtaattgttcctgcctcacaggagctgttgtgaggattaaacagagagtatgtctttagcgcggtgcctggcaccagtgcctggcatgtagtaggggcacaacaaatataaggtccactttgcttttcttttttctatagagaatcctttcctgtttgcattggaagccgtggttatctctgttggctccatgggattgattatcagccttctctgtgtgtatttctggctggaacggtgagatttggagaagcccagaaaaatgaggggaacggtagctgacaatagcagaggagggttttgcagggtctttaggagtaaaggatgagacagtaagtaatgagagattacccaagagggtttggtgatggaaggaagccacaggcacagagaacacagaatcactttatttcatatgggacaactgggagaagggtgataaaaaagctttaacctatgtgctcctgctccctctttctcccctgtcaggacgatgccccgaattcccaccctgaagaacctagaggatcttgttactgaataccacgggaacttttcggtgagaacgctgtcataagcatgctgcagtctatcaactgccaactgcctgccagcaagacagacagagtgtgggggtgggggcagagaggagagggaaggaggccctgcactaactgtcaggatgtggccgaccaaatggggcatggactatacagagagagacacacacagaagtgcagattatagattgaatgaggcagatggcaactggtattgggggcccaggagcctgtgtatcccttctgtaatcaattacagtggttgcagacatcatgagtactcctttggcacagagctcggtcttttacttcctgcccctaattgacccctgacctggacatatctgtctttaggcctggagtggtgtgtctaagggactggctgagagtctgcagccagactacagtgaacgactctgcctcgtcagtgagattcccccaaaaggaggggcccttggggaggggcctggggcctccccatgcaaccagcatagcccctactgggcccccccatgttacaccctaaagcctgaaacctgaaccccaatcctctgacagaagaaccccagggtcctgtagccctaagtggtactaactttccttcattcaacccacctgcgtctcatactcacctcaccccactgtggctgatttggaattttgtgcccccatgtaagcaccccttcatttggcattccccacttgagaattacccttttgccccgaacatgtttttcttctccctcagtctggcccttccttttcgcaggattcttcctccctccctctttccctcccttcctctttccatctaccctccgattgttcctgaaccgatgagaaataaagtttctgttgataatcatcaaaaatgtctgtcatgggggtggggagcaggggaagcctgggatgcaatgagggtgggaggggaagaaaaaggagtagtacattcatgctgtggaggcatctaaaaaaataaaaaaaataaaaaaagcattattgactgatgcatgtaacctttttttttttttttttttttttctgtctcttgatcagatcttatagctg

SEQ ID NO: 930 - DNA, 212 bp, unidentified
  source 1..212: mol_type = other DNA
agatctgatcaagagacaggtagtgtatttttttttttttttttatcatcctgtctcttgatcagatctttttttttttttttttttttttgcgaccttttttttttttttttgctagaaagagtactgttctggaaactgacttttttttttttttttggtcgctttttttttttttgatacatttagatctgatcaagagacaggatgat

SEQ ID NO: 931 - DNA, 214 bp, unidentified
  source 1..214: mol_type = other DNA
cacgtgctgtctcttgatcagatcttttctcgatcattattattttttgcgaccttttttttttttttttgttgagaatggtgctagtggtagtgaacagtttttttttttttttggtcgctttttttttttttttttttttagatctgatcaagagacagcacgtgttttttttttttttttttttgacgaatactgtctcttgatcagatct

SEQ ID NO: 932 - DNA, 4695 bp, unidentified; identical to SEQ ID NO: 920
  source 1..4695: mol_type = other DNA

SEQ ID NO: 933 - DNA, 215 bp, unidentified
  source 1..215: mol_type = other DNA
cacgtgctgtctcttgatcagatcttttctcgatcattattattttttgcgaccttttttttttttttttagcaaattggtaatactcctgcctccacagttttttttttttttttggtcgctttttttttttttttttttttagatctgatcaagagacagcacgtgttttttttttttttttttttcagctatactgtctcttgatcagatct

SEQ ID NO: 934 - DNA, 212 bp, unidentified
  source 1..212: mol_type = other DNA
agatctgatcaagagacagagtatgaatttttttttttttttttatcatcctgtctcttgatcagatctttttttttttttttttttttttgcgaccttttttttttttttttccttctcctctaaatcattaccttctataattttttttttttttttggtcgctttttttttttttgatacatttagatctgatcaagagacaggatgat

SEQ ID NO: 935 - DNA, 4694 bp, unidentified; identical to SEQ ID NO: 923
  source 1..4694: mol_type = other DNA

SEQ ID NO: 936 - DNA, 212 bp, unidentified
  source 1..212: mol_type = other DNA
ctgtctcttgatcagatctgtagtgtatttttttttttttttttatcatcagatctgatcaagagacagttttttttttttttttttttttgcgaccttttttttttttttttgctagaaagagtactgttctggaaactgacttttttttttttttttggtcgctttttttttttttgatacatttctgtctcttgatcagatctgatgat

SEQ ID NO: 937 - DNA, 215 bp, unidentified
  source 1..215: mol_type = other DNA
cacgtgagatctgatcaagagacagtttctcgatcattattattttttgcgaccttttttttttttttttgttgagaatggtgctagtggtagtgaacagttttttttttttttttggtcgctttttttttttttttttttttctgtctcttgatcagatctcacgtgttttttttttttttttttttgacgaataagatctgatcaagagacag

SEQ ID NO: 938 - DNA, 4695 bp, unidentified; identical to SEQ ID NO: 926
  source 1..4695: mol_type = other DNA

SEQ ID NO: 939 - DNA, 215 bp, unidentified
  source 1..215: mol_type = other DNA
cacgtgagatctgatcaagagacagtttctcgatcattattattttttgcgaccttttttttttttttttagcaaattggtaatactcctgcctccacagttttttttttttttttggtcgctttttttttttttttttttttctgtctcttgatcagatctcacgtgttttttttttttttttttttcagctataagatctgatcaagagacag

SEQ ID NO: 940 - DNA, 212 bp, unidentified
  source 1..212: mol_type = other DNA
ctgtctcttgatcagatctagtatgaatttttttttttttttttatcatcagatctgatcaagagacagttttttttttttttttttttttgcgaccttttttttttttttttccttctcctctaaatcattaccttctataattttttttttttttttggtcgctttttttttttttgatacatttctgtctcttgatcagatctgatgat

SEQ ID NO: 941 - DNA, 4694 bp, unidentified; identical to SEQ ID NO: 929
  source 1..4694: mol_type = other DNA

SEQ ID NO: 942 - DNA, 224 bp, unidentified
  source 1..224: mol_type = other DNA
agatctgatcaagagacaggtagtgtatttttttttttttttttatcatcctgtctcttgatcagatctttttttttttttttttttttttgcggcgatcggcttttttttttttttttgctagaaagagtactgttctggaaactgacttttttttttttttttgccgatcgccgctttttttttttttgatacatttagatctgatcaagagacaggatgat

SEQ ID NO: 943 - DNA, 227 bp, unidentified
  source 1..227: mol_type = other DNA
cacgtgctgtctcttgatcagatcttttctcgatcattattattttttgcggcgatcggcttttttttttttttttgttgagaatggtgctagtggtagtgaacagttttttttttttttttgccgatcgccgctttttttttttttttttttttagatctgatcaagagacagcacgtgttttttttttttttttttttgacgaatactgtctcttgatcagatct

SEQ ID NO: 944 - DNA, 4695 bp, unidentified; identical to SEQ ID NO: 920
  source 1..4695: mol_type = other DNA

SEQ ID NO: 945 - DNA, 227 bp, unidentified
  source 1..227: mol_type = other DNA
cacgtgctgtctcttgatcagatcttttctcgatcattattattttttgcggcgatcggcttttttttttttttttagcaaattggtaatactcctgcctccacagttttttttttttttttgccgatcgccgctttttttttttttttttttttagatctgatcaagagacagcacgtgttttttttttttttttttttcagctatactgtctcttgatcagatct

SEQ ID NO: 946 - DNA, 224 bp, unidentified
  source 1..224: mol_type = other DNA
agatctgatcaagagacagagtatgaatttttttttttttttttatcatcctgtctcttgatcagatctttttttttttttttttttttttgcggcgatcggcttttttttttttttttccttctcctctaaatcattaccttctataattttttttttttttttgccgatcgccgctttttttttttttgatacatttagatctgatcaagagacaggatgat

SEQ ID NO: 947 - DNA, 4694 bp, unidentified; identical to SEQ ID NO: 923
  source 1..4694: mol_type = other DNA

SEQ ID NO: 948 - DNA, 224 bp, unidentified
  source 1..224: mol_type = other DNA
ctgtctcttgatcagatctgtagtgtatttttttttttttttttatcatcagatctgatcaagagacagttttttttttttttttttttttgcggcgatcggcttttttttttttttttgctagaaagagtactgttctggaaactgacttttttttttttttttgccgatcgccgctttttttttttttgatacatttctgtctcttgatcagatctgatgat

SEQ ID NO: 949 - DNA, 227 bp, unidentified
  source 1..227: mol_type = other DNA
cacgtgagatctgatcaagagacagtttctcgatcattattattttttgcggcgatcggcttttttttttttttttgttgagaatggtgctagtggtagtgaacagttttttttttttttttgccgatcgccgctttttttttttttttttttttctgtctcttgatcagatctcacgtgttttttttttttttttttttgacgaataagatctgatcaagagacag

SEQ ID NO: 950 - DNA, 4695 bp, unidentified; identical to SEQ ID NO: 926
  source 1..4695: mol_type = other DNA

SEQ ID NO: 951 - DNA, 227 bp, unidentified
  source 1..227: mol_type = other DNA
cacgtgagatctgatcaagagacagtttctcgatcattattattttttgcggcgatcggcttttttttttttttttagcaaattggtaatactcctgcctccacagttttttttttttttttgccgatcgccgctttttttttttttttttttttctgtctcttgatcagatctcacgtgttttttttttttttttttttcagctataagatctgatcaagagacag

SEQ ID NO: 952 - DNA, 224 bp, unidentified
  source 1..224: mol_type = other DNA
ctgtctcttgatcagatctagtatgaatttttttttttttttttatcatcagatctgatcaagagacagttttttttttttttttttttttgcggcgatcggcttttttttttttttttccttctcctctaaatcattaccttctataattttttttttttttttgccgatcgccgctttttttttttttgatacatttctgtctcttgatcagatctgatgat

SEQ ID NO: 953 - DNA, 4694 bp, unidentified; identical to SEQ ID NO: 929
  source 1..4694: mol_type = other DNA

SEQ ID NO: 954 - DNA, 261 bp, unidentified
  source 1..261: mol_type = other DNA
tcgtcggcagcgtcagatgtgtataagagacaggtagtgtatttttttttttttttttatcatcgtctcgtgggctcggagatgtgtataagagacagttttttttttttttttttttttggcgatcgcttttttttttttttttgctagaaagagtactgttctggaaactgacttttttttttttttttgcgatcgcctttttttttttttgatacattttcgtcggcagcgtcagatgtgtataagagacaggatgat

SEQ ID NO: 955 - DNA, 265 bp, unidentified
  source 1..265: mol_type = other DNA
cacgtggtctcgtgggctcggagatgtgtataagagacagtttctcgatcattattattttttggcgatcgcttttttttttttttttgttgagaatggtgctagtggtagtgaacagttttttttttttttttgcgatcgccttttttttttttttttttttttcgtcggcagcgtcagatgtgtataagagacagcacgtgttttttttttttttttttttgacgaatagtctcgtgggctcggagatgtgtataagagacag

SEQ ID NO: 956 - DNA, 4724 bp, unidentified
  source 1..4724: mol_type = other DNA
tacactacgtctcgtgggctcggagatgtgtataagagacagttttttttttttttttttttttggttacatgcatcagtcaataatgctttttttattttttttatttttttagatgcctccacagcatgaatgtactactcctttttcttcccctcccaccctcattgcatcccaggcttcccctgctccccacccccatgacagacatttttgatgattatcaacagaaactttatttctcatcggttcaggaacaatcggagggtagatggaaagaggaagggagggaaagagggagggaggaagaatcctgcgaaaaggaagggccagactgagggagaagaaaaacatgttcggggcaaaagggtaattctcaagtggggaatgccaaatgaaggggtgcttacatgggggcacaaaattccaaatcagccacagtggggtgaggtgagtatgagacgcaggtgggttgaatgaaggaaagttagtaccacttagggctacaggaccctggggttcttctgtcagaggattggggttcaggtttcaggctttagggtgtaacatgggggggcccagtaggggctatgctggttgcatggggaggccccaggcccctccccaagggcccctccttttgggggaatctcactgacgaggcagagtcgttcactgtagtctggctgcagactctcagccagtcccttagacacaccactccaggcctaaagacagatatgtccaggtcaggggtcaattaggggcaggaagtaaaagaccgagctctgtgccaaaggagtactcatgatgtctgcaaccactgtaattgattacagaagggatacacaggctcctgggcccccaataccagttgccatctgcctcattcaatctataatctgcacttctgtgtgtgtctctctctgtatagtccatgccccatttggtcggccacatcctgacagttagtgcagggcctccttccctctcctctctgcccccacccccacactctgtctgtcttgctggcaggcagttggcagttgatagactgcagcatgcttatgacagcgttctcaccgaaaagttcccgtggtattcagtaacaagatcctctaggttcttcagggtgggaattcggggcatcgtcctgacaggggagaaagagggagcaggagcacataggttaaagcttttttatcacccttctcccagttgtcccatatgaaataaagtgattctgtgttctctgtgcctgtggcttccttccatcaccaaaccctcttgggtaatctctcattacttactgtctcatcctttactcctaaagaccctgcaaaaccctcctctgctattgtcagctaccgttcccctcatttttctgggcttctccaaatctcaccgttccagccagaaatacacacagagaaggctgataatcaatcccatggagccaacagagataaccacggcttccaatgcaaacaggaaaggattctctatagaaaaaagaaaagcaaagtggaccttatatttgttgtgcccctactacatgccaggcactggtgccaggcaccgcgctaaagacatactctctgtttaatcctcacaacagctcctgtgaggcaggaacaattacctccatcttacatcttaggaaacagaatccaagagtttagggatgtggccaaggccaaagaggtagtatgtggcacagcctagatccagctggttccaaagccatcttcaccttgcaggctctctaggaatgcttcagggaaatcctatacattctatagcccccttgagtacccctcagcctccttctcaatccactcccctactctaacaacacgctaacccaaccctacacagaaaaaccttgatttctagaggttggggttagacagtgtggagagatggggcaccaagtttaggggctttagtgacagggaagtggagcaaaagacagtggtgttagaaaggctggggtgttgggctcatggattgggtcatgtgggcccattttaccttttgaagtattgctcccccagtggattgggtggctccattcactccaatgctgagcacttccacagagtgggttaaagcggctccgaacacgaaacgtgtagcgtttctgcccatccacactaggcaaggagaacttatgtctataatccactgattgttccttgaggagaaagaggatgagggaaagtgggtgtctatgagagaagggagaattaaaacatactcctgaacacccaccagtgtcatctctgctactgcccagtttctctctcatctcttgactactcaagccacactgctcccttcactgacttgaatctaatgcctcccctctggatccccttaatggcttccttttgtttacttgtctatctggtatcaggaagagtatgggtagggaatccctaatgaaaactcactggtgtcaggaatggtggctcacgcctgtaatcccagcactttgggaggccgaggtgggcagatcacctgaggtcaggagttcaagaccagcctgaccaacatggcaaaaccctgtctttactaaaaatacaaaaattagccaggcatggttgtgcatgctcccagctacttgggaggctgaagcaggagaatcacttgaaccagggagacagaggtcgcagtgagcccaagatcgccccactgcactcaagcctgggcaacagagtgaggctctgtctcaaaaaaaaaaaaaaaagaaagaaagaaagaaaagaaaagaaaaaaagaaaactcactggagaaaataggggggaaaggagttggaggagggagggtagggggtgagcagagaagctgggaggcagagaacaggagcttgatattaggtccttctatctgtctggttgaatcctttagccctactttcttggccttagctgctacattcacgtccctagtcactcacagtccagctgtggtcccagtcagtccggtactgcaccaagtgctccaaacagtggttcaagaatctgttgttccagttcagttctagctgggattcactcagtttgtgaagtgttaggttctctggagcccaggggatcactggagatatgtgtgcatatgtggtcattcccctggcctagacaagtcaggatcctgaaggtagtgcccctaatacctcctcccttcccatcatgatcccctacctcctcttttctgcccatgtacccttatgataaaagaacactactctgtagactccaatgtcccacagtatccctggtctcttgaccctttctttccaaattacccagattctgcagttttagcatctgtgtggcctgtctcctgggttcccgtgggtcctggagctgaacaacaaatgtttggtagaggtggatctcctttttttgcaactgacagccagaagtgatttcttcagagaatagatagtggctgcacttctggactttatcattatccgagttcttgtacctagaggagaaaggttggaaggaagaggaacagtggggccaatctgggtactgcagatatccagagcctagcctcatctcccctcaaccgacttatgacttaccccaggagaaaacagtggggtacctgggagacttgctaccctctctcttggtctctgatccaacccacctcttcttcatcccctccccctcgtcccttctcataccaataatgcagagtgaggttggtaggctggggctcagagctgctgttccaagtgcaattcatgtactcgacattgaacacaaaacactgaacctctgggaggggcagagtggaaacactgagggagtcagtgggcatagtggtcaggaagaaatctagattggggagaaaatgaaggcagggagggaaagagaaatgatggtcagaaggaggaggccaagcacggtggctcatgtctgtaatcctggtgctttgaaaggctgaggcaggaggatcactagaggccaggagtttgagaccagcctaggcaacatagtgagaccctgcctcaaaagaaagaaagaaacaaacaaacaagaaagaaagaaagaagaagtagcgtgaggcagggaaccctcccccttgcccttcccactccacttttcaattctgcccacatgattgtaatggccagtggcaggcaccagatctctgtacggccccttcccacagccacccttctcaccagccccctccagtcccagatttcccaccagctgtggtgtcttcattcccattgggcgtcagaattgtcgtgttcagccccactcccagcaggggcagctgcaggaataagagggatgtgaatggtaatgatggcttcaacatggcgcttgctcttcattccctgggtgtagtctgtctgtgtcaggaacctgggtccctcacccactacccctccccacccacacgtttcctctgtcatagcttccggtggaaagaaccttataaaccagggctttacagagggtgtggcaaatatgtgctgtgtgacacgggctaagtcctctaggagattaggtgctgctgtaaggtggtaaacagaaactaaagctggatatacaatagtgtcacagactcaaaaatcctcagcccacctagatcctgggaaggatctgttcactgcggccgcatgttcttttttttttttttttttttttttcgtcggcagcgtcagatgtgtataagagacagtattcgtc

SEQ ID NO: 957 - DNA, 265 bp, unidentified
  source 1..265: mol_type = other DNA
cacgtggtctcgtgggctcggagatgtgtataagagacagtttctcgatcattattattttttggcgatcgcttttttttttttttttagcaaattggtaatactcctgcctccacagttttttttttttttttgcgatcgccttttttttttttttttttttttcgtcggcagcgtcagatgtgtataagagacagcacgtgttttttttttttttttttttcagctatagtctcgtgggctcggagatgtgtataagagacag

SEQ ID NO: 958 - DNA, 261 bp, unidentified
  source 1..261: mol_type = other DNA
tcgtcggcagcgtcagatgtgtataagagacagagtatgaatttttttttttttttttatcatcgtctcgtgggctcggagatgtgtataagagacagttttttttttttttttttttttggcgatcgcttttttttttttttttccttctcctctaaatcattaccttctataattttttttttttttttgcgatcgcctttttttttttttgatacattttcgtcggcagcgtcagatgtgtataagagacaggatgat

SEQ ID NO: 959 - DNA, 4723 bp, unidentified
  source 1..4723: mol_type = other DNA
ttcatactgtctcgtgggctcggagatgtgtataagagacagttttttttttttttttttttttgaacatgcggccgcgtgaacagatccttcccaggatctaggtgggctgaggatttttgagtctgtgacactattgtatatccagctttagtttctgtttaccaccttacagcagcacctaatctcctagaggacttagcccgtgtcacacagcacatatttgccacaccctctgtaaagccctggtttataaggttctttccaccggaagctatgacagaggaaacgtgtgggtggggaggggtagtgggtgagggacccaggttcctgacacagacagactacacccagggaatgaagagcaagcgccatgttgaagccatcattaccattcacatccctcttattcctgcagctgcccctgctgggagtggggctgaacacgacaattctgacgcccaatgggaatgaagacaccacagctggtgggaaatctgggactggagggggctggtgagaagggtggctgtgggaaggggccgtacagagatctggtgcctgccactggccattacaatcatgtgggcagaattgaaaagtggagtgggaagggcaagggggagggttccctgcctcacgctacttcttctttctttctttcttgtttgtttgtttctttctttcttttgaggcagggtctcactatgttgcctaggctggtctcaaactcctggcctctagtgatcctcctgcctcagcctttcaaagcaccaggattacagacatgagccaccgtgcttggcctcctccttctgaccatcatttctctttccctccctgccttcattttctccccaatctagatttcttcctgaccactatgcccactgactccctcagtgtttccactctgcccctcccagaggttcagtgttttgtgttcaatgtcgagtacatgaattgcacttggaacagcagctctgagccccagcctaccaacctcactctgcattattggtatgagaagggacgagggggaggggatgaagaagaggtgggttggatcagagaccaagagagagggtagcaagtctcccaggtaccccactgttttctcctggggtaagtcataagtcggttgaggggagatgaggctaggctctggatatctgcagtacccagattggccccactgttcctcttccttccaacctttctcctctaggtacaagaactcggataatgataaagtccagaagtgcagccactatctattctctgaagaaatcacttctggctgtcagttgcaaaaaaaggagatccacctctaccaaacatttgttgttcagctccaggacccacgggaacccaggagacaggccacacagatgctaaaactgcagaatctgggtaatttggaaagaaagggtcaagagaccagggatactgtgggacattggagtctacagagtagtgttcttttatcataagggtacatgggcagaaaagaggaggtaggggatcatgatgggaagggaggaggtattaggggcactaccttcaggatcctgacttgtctaggccaggggaatgaccacatatgcacacatatctccagtgatcccctgggctccagagaacctaacacttcacaaactgagtgaatcccagctagaactgaactggaacaacagattcttgaaccactgtttggagcacttggtgcagtaccggactgactgggaccacagctggactgtgagtgactagggacgtgaatgtagcagctaaggccaagaaagtagggctaaaggattcaaccagacagatagaaggacctaatatcaagctcctgttctctgcctcccagcttctctgctcaccccctaccctccctcctccaactcctttcccccctattttctccagtgagttttctttttttcttttcttttctttctttctttcttttttttttttttttgagacagagcctcactctgttgcccaggcttgagtgcagtggggcgatcttgggctcactgcgacctctgtctccctggttcaagtgattctcctgcttcagcctcccaagtagctgggagcatgcacaaccatgcctggctaatttttgtatttttagtaaagacagggttttgccatgttggtcaggctggtcttgaactcctgacctcaggtgatctgcccacctcggcctcccaaagtgctgggattacaggcgtgagccaccattcctgacaccagtgagttttcattagggattccctacccatactcttcctgataccagatagacaagtaaacaaaaggaagccattaaggggatccagaggggaggcattagattcaagtcagtgaagggagcagtgtggcttgagtagtcaagagatgagagagaaactgggcagtagcagagatgacactggtgggtgttcaggagtatgttttaattctcccttctctcatagacacccactttccctcatcctctttctcctcaaggaacaatcagtggattatagacataagttctccttgcctagtgtggatgggcagaaacgctacacgtttcgtgttcggagccgctttaacccactctgtggaagtgctcagcattggagtgaatggagccacccaatccactgggggagcaatacttcaaaaggtaaaatgggcccacatgacccaatccatgagcccaacaccccagcctttctaacaccactgtcttttgctccacttccctgtcactaaagcccctaaacttggtgccccatctctccacactgtctaaccccaacctctagaaatcaaggtttttctgtgtagggttgggttagcgtgttgttagagtaggggagtggattgagaaggaggctgaggggtactcaagggggctatagaatgtataggatttccctgaagcattcctagagagcctgcaaggtgaagatggctttggaaccagctggatctaggctgtgccacatactacctctttggccttggccacatccctaaactcttggattctgtttcctaagatgtaagatggaggtaattgttcctgcctcacaggagctgttgtgaggattaaacagagagtatgtctttagcgcggtgcctggcaccagtgcctggcatgtagtaggggcacaacaaatataaggtccactttgcttttcttttttctatagagaatcctttcctgtttgcattggaagccgtggttatctctgttggctccatgggattgattatcagccttctctgtgtgtatttctggctggaacggtgagatttggagaagcccagaaaaatgaggggaacggtagctgacaatagcagaggagggttttgcagggtctttaggagtaaaggatgagacagtaagtaatgagagattacccaagagggtttggtgatggaaggaagccacaggcacagagaacacagaatcactttatttcatatgggacaactgggagaagggtgataaaaaagctttaacctatgtgctcctgctccctctttctcccctgtcaggacgatgccccgaattcccaccctgaagaacctagaggatcttgttactgaataccacgggaacttttcggtgagaacgctgtcataagcatgctgcagtctatcaactgccaactgcctgccagcaagacagacagagtgtgggggtgggggcagagaggagagggaaggaggccctgcactaactgtcaggatgtggccgaccaaatggggcatggactatacagagagagacacacacagaagtgcagattatagattgaatgaggcagatggcaactggtattgggggcccaggagcctgtgtatcccttctgtaatcaattacagtggttgcagacatcatgagtactcctttggcacagagctcggtcttttacttcctgcccctaattgacccctgacctggacatatctgtctttaggcctggagtggtgtgtctaagggactggctgagagtctgcagccagactacagtgaacgactctgcctcgtcagtgagattcccccaaaaggaggggcccttggggaggggcctggggcctccccatgcaaccagcatagcccctactgggcccccccatgttacaccctaaagcctgaaacctgaaccccaatcctctgacagaagaaccccagggtcctgtagccctaagtggtactaactttccttcattcaacccacctgcgtctcatactcacctcaccccactgtggctgatttggaattttgtgcccccatgtaagcaccccttcatttggcattccccacttgagaattacccttttgccccgaacatgtttttcttctccctcagtctggcccttccttttcgcaggattcttcctccctccctctttccctcccttcctctttccatctaccctccgattgttcctgaaccgatgagaaataaagtttctgttgataatcatcaaaaatgtctgtcatgggggtggggagcaggggaagcctgggatgcaatgagggtgggaggggaagaaaaaggagtagtacattcatgctgtggaggcatctaaaaaaataaaaaaaataaaaaaagcattattgactgatgcatgtaaccttttttttttttttttttttttttcgtcggcagcgtcagatgtgtataagagacagtatagctg

SEQ ID NO: 960 - DNA, 262 bp, unidentified
  source 1..262: mol_type = other DNA
gtctcgtgggctcggagatgtgtataagagacaggtagtgtatttttttttttttttttatcatctcgtcggcagcgtcagatgtgtataagagacagttttttttttttttttttttttggcgatcgcttttttttttttttttgctagaaagagtactgttctggaaactgacttttttttttttttttgcgatcgcctttttttttttttgatacatttgtctcgtgggctcggagatgtgtataagagacaggatgat

SEQ ID NO: 961 - DNA, 264 bp, unidentified
  source 1..264: mol_type = other DNA
cacgtgtcgtcggcagcgtcagatgtgtataagagacagtttctcgatcattattattttttggcgatcgcttttttttttttttttgttgagaatggtgctagtggtagtgaacagttttttttttttttttgcgatcgcctttttttttttttttttttttgtctcgtgggctcggagatgtgtataagagacagcacgtgttttttttttttttttttttgacgaatatcgtcggcagcgtcagatgtgtataagagacag

SEQ ID NO: 962 - DNA, 4724 bp, unidentified
  source 1..4724: mol_type = other DNA
tacactactcgtcggcagcgtcagatgtgtataagagacagttttttttttttttttttttttggttacatgcatcagtcaataatgctttttttattttttttatttttttagatgcctccacagcatgaatgtactactcctttttcttcccctcccaccctcattgcatcccaggcttcccctgctccccacccccatgacagacatttttgatgattatcaacagaaactttatttctcatcggttcaggaacaatcggagggtagatggaaagaggaagggagggaaagagggagggaggaagaatcctgcgaaaaggaagggccagactgagggagaagaaaaacatgttcggggcaaaagggtaattctcaagtggggaatgccaaatgaaggggtgcttacatgggggcacaaaattccaaatcagccacagtggggtgaggtgagtatgagacgcaggtgggttgaatgaaggaaagttagtaccacttagggctacaggaccctggggttcttctgtcagaggattggggttcaggtttcaggctttagggtgtaacatgggggggcccagtaggggctatgctggttgcatggggaggccccaggcccctccccaagggcccctccttttgggggaatctcactgacgaggcagagtcgttcactgtagtctggctgcagactctcagccagtcccttagacacaccactccaggcctaaagacagatatgtccaggtcaggggtcaattaggggcaggaagtaaaagaccgagctctgtgccaaaggagtactcatgatgtctgcaaccactgtaattgattacagaagggatacacaggctcctgggcccccaataccagttgccatctgcctcattcaatctataatctgcacttctgtgtgtgtctctctctgtatagtccatgccccatttggtcggccacatcctgacagttagtgcagggcctccttccctctcctctctgcccccacccccacactctgtctgtcttgctggcaggcagttggcagttgatagactgcagcatgcttatgacagcgttctcaccgaaaagttcccgtggtattcagtaacaagatcctctaggttcttcagggtgggaattcggggcatcgtcctgacaggggagaaagagggagcaggagcacataggttaaagcttttttatcacccttctcccagttgtcccatatgaaataaagtgattctgtgttctctgtgcctgtggcttccttccatcaccaaaccctcttgggtaatctctcattacttactgtctcatcctttactcctaaagaccctgcaaaaccctcctctgctattgtcagctaccgttcccctcatttttctgggcttctccaaatctcaccgttccagccagaaatacacacagagaaggctgataatcaatcccatggagccaacagagataaccacggcttccaatgcaaacaggaaaggattctctatagaaaaaagaaaagcaaagtggaccttatatttgttgtgcccctactacatgccaggcactggtgccaggcaccgcgctaaagacatactctctgtttaatcctcacaacagctcctgtgaggcaggaacaattacctccatcttacatcttaggaaacagaatccaagagtttagggatgtggccaaggccaaagaggtagtatgtggcacagcctagatccagctggttccaaagccatcttcaccttgcaggctctctaggaatgcttcagggaaatcctatacattctatagcccccttgagtacccctcagcctccttctcaatccactcccctactctaacaacacgctaacccaaccctacacagaaaaaccttgatttctagaggttggggttagacagtgtggagagatggggcaccaagtttaggggctttagtgacagggaagtggagcaaaagacagtggtgttagaaaggctggggtgttgggctcatggattgggtcatgtgggcccattttaccttttgaagtattgctcccccagtggattgggtggctccattcactccaatgctgagcacttccacagagtgggttaaagcggctccgaacacgaaacgtgtagcgtttctgcccatccacactaggcaaggagaacttatgtctataatccactgattgttccttgaggagaaagaggatgagggaaagtgggtgtctatgagagaagggagaattaaaacatactcctgaacacccaccagtgtcatctctgctactgcccagtttctctctcatctcttgactactcaagccacactgctcccttcactgacttgaatctaatgcctcccctctggatccccttaatggcttccttttgtttacttgtctatctggtatcaggaagagtatgggtagggaatccctaatgaaaactcactggtgtcaggaatggtggctcacgcctgtaatcccagcactttgggaggccgaggtgggcagatcacctgaggtcaggagttcaagaccagcctgaccaacatggcaaaaccctgtctttactaaaaatacaaaaattagccaggcatggttgtgcatgctcccagctacttgggaggctgaagcaggagaatcacttgaaccagggagacagaggtcgcagtgagcccaagatcgccccactgcactcaagcctgggcaacagagtgaggctctgtctcaaaaaaaaaaaaaaaagaaagaaagaaagaaaagaaaagaaaaaaagaaaactcactggagaaaataggggggaaaggagttggaggagggagggtagggggtgagcagagaagctgggaggcagagaacaggagcttgatattaggtccttctatctgtctggttgaatcctttagccctactttcttggccttagctgctacattcacgtccctagtcactcacagtccagctgtggtcccagtcagtccggtactgcaccaagtgctccaaacagtggttcaagaatctgttgttccagttcagttctagctgggattcactcagtttgtgaagtgttaggttctctggagcccaggggatcactggagatatgtgtgcatatgtggtcattcccctggcctagacaagtcaggatcctgaaggtagtgcccctaatacctcctcccttcccatcatgatcccctacctcctcttttctgcccatgtacccttatgataaaagaacactactctgtagactccaatgtcccacagtatccctggtctcttgaccctttctttccaaattacccagattctgcagttttagcatctgtgtggcctgtctcctgggttcccgtgggtcctggagctgaacaacaaatgtttggtagaggtggatctcctttttttgcaactgacagccagaagtgatttcttcagagaatagatagtggctgcacttctggactttatcattatccgagttcttgtacctagaggagaaaggttggaaggaagaggaacagtggggccaatctgggtactgcagatatccagagcctagcctcatctcccctcaaccgacttatgacttaccccaggagaaaacagtggggtacctgggagacttgctaccctctctcttggtctctgatccaacccacctcttcttcatcccctccccctcgtcccttctcataccaataatgcagagtgaggttggtaggctggggctcagagctgctgttccaagtgcaattcatgtactcgacattgaacacaaaacactgaacctctgggaggggcagagtggaaacactgagggagtcagtgggcatagtggtcaggaagaaatctagattggggagaaaatgaaggcagggagggaaagagaaatgatggtcagaaggaggaggccaagcacggtggctcatgtctgtaatcctggtgctttgaaaggctgaggcaggaggatcactagaggccaggagtttgagaccagcctaggcaacatagtgagaccctgcctcaaaagaaagaaagaaacaaacaaacaagaaagaaagaaagaagaagtagcgtgaggcagggaaccctcccccttgcccttcccactccacttttcaattctgcccacatgattgtaatggccagtggcaggcaccagatctctgtacggccccttcccacagccacccttctcaccagccccctccagtcccagatttcccaccagctgtggtgtcttcattcccattgggcgtcagaattgtcgtgttcagccccactcccagcaggggcagctgcaggaataagagggatgtgaatggtaatgatggcttcaacatggcgcttgctcttcattccctgggtgtagtctgtctgtgtcaggaacctgggtccctcacccactacccctccccacccacacgtttcctctgtcatagcttccggtggaaagaaccttataaaccagggctttacagagggtgtggcaaatatgtgctgtgtgacacgggctaagtcctctaggagattaggtgctgctgtaaggtggtaaacagaaactaaagctggatatacaatagtgtcacagactcaaaaatcctcagcccacctagatcctgggaaggatctgttcactgcggccgcatgttctttttttttttttttttttttttgtctcgtgggctcggagatgtgtataagagacagtattcgtc

SEQ ID NO: 963 - DNA, 264 bp, unidentified
  source 1..264: mol_type = other DNA
cacgtgtcgtcggcagcgtcagatgtgtataagagacagtttctcgatcattattattttttggcgatcgcttttttttttttttttagcaaattggtaatactcctgcctccacagttttttttttttttttgcgatcgcctttttttttttttttttttttgtctcgtgggctcggagatgtgtataagagacagcacgtgttttttttttttttttttttcagctatatcgtcggcagcgtcagatgtgtataagagacag

SEQ ID NO: 964 - DNA, 262 bp, unidentified
  source 1..262: mol_type = other DNA
gtctcgtgggctcggagatgtgtataagagacagagtatgaatttttttttttttttttatcatctcgtcggcagcgtcagatgtgtataagagacagttttttttttttttttttttttggcgatcgcttttttttttttttttccttctcctctaaatcattaccttctataattttttttttttttttgcgatcgcctttttttttttttgatacatttgtctcgtgggctcggagatgtgtataagagacaggatgat

SEQ ID NO: 965 - DNA, 4723 bp, unidentified
  source 1..4723: mol_type = other DNA
ttcatacttcgtcggcagcgtcagatgtgtataagagacagttttttttttttttttttttttgaacatgcggccgcgtgaacagatccttcccaggatctaggtgggctgaggatttttgagtctgtgacactattgtatatccagctttagtttctgtttaccaccttacagcagcacctaatctcctagaggacttagcccgtgtcacacagcacatatttgccacaccctctgtaaagccctggtttataaggttctttccaccggaagctatgacagaggaaacgtgtgggtggggaggggtagtgggtgagggacccaggttcctgacacagacagactacacccagggaatgaagagcaagcgccatgttgaagccatcattaccattcacatccctcttattcctgcagctgcccctgctgggagtggggctgaacacgacaattctgacgcccaatgggaatgaagacaccacagctggtgggaaatctgggactggagggggctggtgagaagggtggctgtgggaaggggccgtacagagatctggtgcctgccactggccattacaatcatgtgggcagaattgaaaagtggagtgggaagggcaagggggagggttccctgcctcacgctacttcttctttctttctttcttgtttgtttgtttctttctttcttttgaggcagggtctcactatgttgcctaggctggtctcaaactcctggcctctagtgatcctcctgcctcagcctttcaaagcaccaggattacagacatgagccaccgtgcttggcctcctccttctgaccatcatttctctttccctccctgccttcattttctccccaatctagatttcttcctgaccactatgcccactgactccctcagtgtttccactctgcccctcccagaggttcagtgttttgtgttcaatgtcgagtacatgaattgcacttggaacagcagctctgagccccagcctaccaacctcactctgcattattggtatgagaagggacgagggggaggggatgaagaagaggtgggttggatcagagaccaagagagagggtagcaagtctcccaggtaccccactgttttctcctggggtaagtcataagtcggttgaggggagatgaggctaggctctggatatctgcagtacccagattggccccactgttcctcttccttccaacctttctcctctaggtacaagaactcggataatgataaagtccagaagtgcagccactatctattctctgaagaaatcacttctggctgtcagttgcaaaaaaaggagatccacctctaccaaacatttgttgttcagctccaggacccacgggaacccaggagacaggccacacagatgctaaaactgcagaatctgggtaatttggaaagaaagggtcaagagaccagggatactgtgggacattggagtctacagagtagtgttcttttatcataagggtacatgggcagaaaagaggaggtaggggatcatgatgggaagggaggaggtattaggggcactaccttcaggatcctgacttgtctaggccaggggaatgaccacatatgcacacatatctccagtgatcccctgggctccagagaacctaacacttcacaaactgagtgaatcccagctagaactgaactggaacaacagattcttgaaccactgtttggagcacttggtgcagtaccggactgactgggaccacagctggactgtgagtgactagggacgtgaatgtagcagctaaggccaagaaagtagggctaaaggattcaaccagacagatagaaggacctaatatcaagctcctgttctctgcctcccagcttctctgctcaccccctaccctccctcctccaactcctttcccccctattttctccagtgagttttctttttttcttttcttttctttctttctttcttttttttttttttttgagacagagcctcactctgttgcccaggcttgagtgcagtggggcgatcttgggctcactgcgacctctgtctccctggttcaagtgattctcctgcttcagcctcccaagtagctgggagcatgcacaaccatgcctggctaatttttgtatttttagtaaagacagggttttgccatgttggtcaggctggtcttgaactcctgacctcaggtgatctgcccacctcggcctcccaaagtgctgggattacaggcgtgagccaccattcctgacaccagtgagttttcattagggattccctacccatactcttcctgataccagatagacaagtaaacaaaaggaagccattaaggggatccagaggggaggcattagattcaagtcagtgaagggagcagtgtggcttgagtagtcaagagatgagagagaaactgggcagtagcagagatgacactggtgggtgttcaggagtatgttttaattctcccttctctcatagacacccactttccctcatcctctttctcctcaaggaacaatcagtggattatagacataagttctccttgcctagtgtggatgggcagaaacgctacacgtttcgtgttcggagccgctttaacccactctgtggaagtgctcagcattggagtgaatggagccacccaatccactgggggagcaatacttcaaaaggtaaaatgggcccacatgacccaatccatgagcccaacaccccagcctttctaacaccactgtcttttgctccacttccctgtcactaaagcccctaaacttggtgccccatctctccacactgtctaaccccaacctctagaaatcaaggtttttctgtgtagggttgggttagcgtgttgttagagtaggggagtggattgagaaggaggctgaggggtactcaagggggctatagaatgtataggatttccctgaagcattcctagagagcctgcaaggtgaagatggctttggaaccagctggatctaggctgtgccacatactacctctttggccttggccacatccctaaactcttggattctgtttcctaagatgtaagatggaggtaattgttcctgcctcacaggagctgttgtgaggattaaacagagagtatgtctttagcgcggtgcctggcaccagtgcctggcatgtagtaggggcacaacaaatataaggtccactttgcttttcttttttctatagagaatcctttcctgtttgcattggaagccgtggttatctctgttggctccatgggattgattatcagccttctctgtgtgtatttctggctggaacggtgagatttggagaagcccagaaaaatgaggggaacggtagctgacaatagcagaggagggttttgcagggtctttaggagtaaaggatgagacagtaagtaatgagagattacccaagagggtttggtgatggaaggaagccacaggcacagagaacacagaatcactttatttcatatgggacaactgggagaagggtgataaaaaagctttaacctatgtgctcctgctccctctttctcccctgtcaggacgatgccccgaattcccaccctgaagaacctagaggatcttgttactgaataccacgggaacttttcggtgagaacgctgtcataagcatgctgcagtctatcaactgccaactgcctgccagcaagacagacagagtgtgggggtgggggcagagaggagagggaaggaggccctgcactaactgtcaggatgtggccgaccaaatggggcatggactatacagagagagacacacacagaagtgcagattatagattgaatgaggcagatggcaactggtattgggggcccaggagcctgtgtatcccttctgtaatcaattacagtggttgcagacatcatgagtactcctttggcacagagctcggtcttttacttcctgcccctaattgacccctgacctggacatatctgtctttaggcctggagtggtgtgtctaagggactggctgagagtctgcagccagactacagtgaacgactctgcctcgtcagtgagattcccccaaaaggaggggcccttggggaggggcctggggcctccccatgcaaccagcatagcccctactgggcccccccatgttacaccctaaagcctgaaacctgaaccccaatcctctgacagaagaaccccagggtcctgtagccctaagtggtactaactttccttcattcaacccacctgcgtctcatactcacctcaccccactgtggctgatttggaattttgtgcccccatgtaagcaccccttcatttggcattccccacttgagaattacccttttgccccgaacatgtttttcttctccctcagtctggcccttccttttcgcaggattcttcctccctccctctttccctcccttcctctttccatctaccctccgattgttcctgaaccgatgagaaataaagtttctgttgataatcatcaaaaatgtctgtcatgggggtggggagcaggggaagcctgggatgcaatgagggtgggaggggaagaaaaaggagtagtacattcatgctgtggaggcatctaaaaaaataaaaaaaataaaaaaagcattattgactgatgcatgtaacctttttttttttttttttttttttgtctcgtgggctcggagatgtgtataagagacagtatagctg

SEQ ID NO: 966 - DNA, 255 bp, unidentified
  source 1..255: mol_type = other DNA
tcgtcggcagcgtcagatgtgtataagagacaggtagtgtatttttttttttttttttatcatcgtctcgtgggctcggagatgtgtataagagacagttttttttttttttttttttttgcgaccttttttttttttttttgctagaaagagtactgttctggaaactgacttttttttttttttttggtcgctttttttttttttgatacattttcgtcggcagcgtcagatgtgtataagagacaggatgat

SEQ ID NO: 967 - DNA, 258 bp, unidentified
  source 1..258: mol_type = other DNA
cacgtggtctcgtgggctcggagatgtgtataagagacagtttctcgatcattattattttttgcgaccttttttttttttttttgttgagaatggtgctagtggtagtgaacagtttttttttttttttggtcgcttttttttttttttttttttttcgtcggcagcgtcagatgtgtataagagacagcacgtgttttttttttttttttttttgacgaatagtctcgtgggctcggagatgtgtataagagacag

SEQ ID NO: 968 - DNA, 4724 bp, unidentified; identical to SEQ ID NO: 956
  source 1..4724: mol_type = other DNA

SEQ ID NO: 969 - DNA, 259 bp, unidentified
  source 1..259: mol_type = other DNA
cacgtggtctcgtgggctcggagatgtgtataagagacagtttctcgatcattattattttttgcgaccttttttttttttttttagcaaattggtaatactcctgcctccacagttttttttttttttttggtcgcttttttttttttttttttttttcgtcggcagcgtcagatgtgtataagagacagcacgtgttttttttttttttttttttcagctatagtctcgtgggctcggagatgtgtataagagacag

SEQ ID NO: 970 - DNA, 255 bp, unidentified
  source 1..255: mol_type = other DNA
tcgtcggcagcgtcagatgtgtataagagacagagtatgaatttttttttttttttttatcatcgtctcgtgggctcggagatgtgtataagagacagttttttttttttttttttttttgcgaccttttttttttttttttccttctcctctaaatcattaccttctataattttttttttttttttggtcgctttttttttttttgatacattttcgtcggcagcgtcagatgtgtataagagacaggatgat

SEQ ID NO: 971 - DNA, 4723 bp, unidentified; identical to SEQ ID NO: 959
  source 1..4723: mol_type = other DNA

SEQ ID NO: 972 - DNA, 256 bp, unidentified
  source 1..256: mol_type = other DNA
gtctcgtgggctcggagatgtgtataagagacaggtagtgtatttttttttttttttttatcatctcgtcggcagcgtcagatgtgtataagagacagttttttttttttttttttttttgcgaccttttttttttttttttgctagaaagagtactgttctggaaactgacttttttttttttttttggtcgctttttttttttttgatacatttgtctcgtgggctcggagatgtgtataagagacaggatgat

SEQ ID NO: 973 - DNA, 258 bp, unidentified
  source 1..258: mol_type = other DNA
cacgtgtcgtcggcagcgtcagatgtgtataagagacagtttctcgatcattattattttttgcgaccttttttttttttttttgttgagaatggtgctagtggtagtgaacagttttttttttttttttggtcgctttttttttttttttttttttgtctcgtgggctcggagatgtgtataagagacagcacgtgttttttttttttttttttttgacgaatatcgtcggcagcgtcagatgtgtataagagacag

SEQ ID NO: 974 - DNA, 4724 bp, unidentified; identical to SEQ ID NO: 962
  source 1..4724: mol_type = other DNA

SEQ ID NO: 975 - DNA, 258 bp, unidentified
  source 1..258: mol_type = other DNA
cacgtgtcgtcggcagcgtcagatgtgtataagagacagtttctcgatcattattattttttgcgaccttttttttttttttttagcaaattggtaatactcctgcctccacagttttttttttttttttggtcgctttttttttttttttttttttgtctcgtgggctcggagatgtgtataagagacagcacgtgttttttttttttttttttttcagctatatcgtcggcagcgtcagatgtgtataagagacag

SEQ ID NO: 976 - DNA, 256 bp, unidentified
  source 1..256: mol_type = other DNA
gtctcgtgggctcggagatgtgtataagagacagagtatgaatttttttttttttttttatcatctcgtcggcagcgtcagatgtgtataagagacagttttttttttttttttttttttgcgaccttttttttttttttttccttctcctctaaatcattaccttctataattttttttttttttttggtcgctttttttttttttgatacatttgtctcgtgggctcggagatgtgtataagagacaggatgat

SEQ ID NO: 977 - DNA, 4723 bp, unidentified; identical to SEQ ID NO: 965
  source 1..4723: mol_type = other DNA

SEQ ID NO: 978 - DNA, 267 bp, unidentified
  source 1..267: mol_type = other DNA
tcgtcggcagcgtcagatgtgtataagagacaggtagtgtatttttttttttttttttatcatcgtctcgtgggctcggagatgtgtataagagacagttttttttttttttttttttttgcggcgatcggcttttttttttttttttgctagaaagagtactgttctggaaactgacttttttttttttttttgccgatcgccgctttttttttttttgatacattttcgtcggcagcgtcagatgtgtataagagacaggatgat

SEQ ID NO: 979 - DNA, 271 bp, unidentified
  source 1..271: mol_type = other DNA
cacgtggtctcgtgggctcggagatgtgtataagagacagtttctcgatcattattattttttgcggcgatcggcttttttttttttttttgttgagaatggtgctagtggtagtgaacagttttttttttttttttgccgatcgccgcttttttttttttttttttttttcgtcggcagcgtcagatgtgtataagagacagcacgtgttttttttttttttttttttgacgaatagtctcgtgggctcggagatgtgtataagagacag

SEQ ID NO: 980 - DNA, 4724 bp, unidentified; identical to SEQ ID NO: 956
  source 1..4724: mol_type = other DNA

SEQ ID NO: 981 - DNA, 271 bp, unidentified
  source 1..271: mol_type = other DNA
cacgtggtctcgtgggctcggagatgtgtataagagacagtttctcgatcattattattttttgcggcgatcggcttttttttttttttttagcaaattggtaatactcctgcctccacagttttttttttttttttgccgatcgccgcttttttttttttttttttttttcgtcggcagcgtcagatgtgtataagagacagcacgtgttttttttttttttttttttcagctatagtctcgtgggctcggagatgtgtataagagacag

SEQ ID NO: 982 - DNA, 267 bp, unidentified
  source 1..267: mol_type = other DNA
tcgtcggcagcgtcagatgtgtataagagacagagtatgaatttttttttttttttttatcatcgtctcgtgggctcggagatgtgtataagagacagttttttttttttttttttttttgcggcgatcggcttttttttttttttttccttctcctctaaatcattaccttctataattttttttttttttttgccgatcgccgctttttttttttttgatacattttcgtcggcagcgtcagatgtgtataagagacaggatgat

SEQ ID NO: 983 - DNA, 4723 bp, unidentified; identical to SEQ ID NO: 959
  source 1..4723: mol_type = other DNA

SEQ ID NO: 984 - DNA, 268 bp, unidentified
  source 1..268: mol_type = other DNA
gtctcgtgggctcggagatgtgtataagagacaggtagtgtatttttttttttttttttatcatctcgtcggcagcgtcagatgtgtataagagacagttttttttttttttttttttttgcggcgatcggcttttttttttttttttgctagaaagagtactgttctggaaactgacttttttttttttttttgccgatcgccgctttttttttttttgatacatttgtctcgtgggctcggagatgtgtataagagacaggatgat

SEQ ID NO: 985 - DNA, 270 bp, unidentified
  source 1..270: mol_type = other DNA
cacgtgtcgtcggcagcgtcagatgtgtataagagacagtttctcgatcattattattttttgcggcgatcggcttttttttttttttttgttgagaatggtgctagtggtagtgaacagttttttttttttttttgccgatcgccgctttttttttttttttttttttgtctcgtgggctcggagatgtgtataagagacagcacgtgttttttttttttttttttttgacgaatatcgtcggcagcgtcagatgtgtataagagacag

SEQ ID NO: 986 - DNA, 4724 bp, unidentified; identical to SEQ ID NO: 962
  source 1..4724: mol_type = other DNA

SEQ ID NO: 987 - DNA, 270 bp, unidentified
  source 1..270: mol_type = other DNA
cacgtgtcgtcggcagcgtcagatgtgtataagagacagtttctcgatcattattattttttgcggcgatcggcttttttttttttttttagcaaattggtaatactcctgcctccacagttttttttttttttttgccgatcgccgctttttttttttttttttttttgtctcgtgggctcggagatgtgtataagagacagcacgtgttttttttttttttttttttcagctatatcgtcggcagcgtcagatgtgtataagagacag

SEQ ID NO: 988 - DNA, 268 bp, unidentified
  source 1..268: mol_type = other DNA
gtctcgtgggctcggagatgtgtataagagacagagtatgaatttttttttttttttttatcatctcgtcggcagcgtcagatgtgtataagagacagttttttttttttttttttttttgcggcgatcggcttttttttttttttttccttctcctctaaatcattaccttctataattttttttttttttttgccgatcgccgctttttttttttttgatacatttgtctcgtgggctcggagatgtgtataagagacaggatgat

SEQ ID NO: 989 - DNA, 4723 bp, unidentified; identical to SEQ ID NO: 965
  source 1..4723: mol_type = other DNA

SEQ ID NO: 990 - DNA, 245 bp, unidentified
  source 1..245: mol_type = other DNA
ggtgatgctgccaacttactgatttagtgtagtgtatttttttttttttttttatcatcactaaatcagtaagttggcagcatcaccttttttttttttttttttttttggcgatcgcttttttttttttttttgctagaaagagtactgttctggaaactgacttttttttttttttttgcgatcgcctttttttttttttgatacatttggtgatgctgccaacttactgatttagtgatgat

SEQ ID NO: 991 - DNA, 248 bp, unidentified
  source 1..248: mol_type = other DNA
cacgtgactaaatcagtaagttggcagcatcacctttctcgatcattattattttttggcgatcgcttttttttttttttttgttgagaatggtgctagtggtagtgaacagttttttttttttttttgcgatcgcctttttttttttttttttttttggtgatgctgccaacttactgatttagtcacgtgttttttttttttttttttttgacgaataactaaatcagtaagttggcagcatcacc

SEQ ID NO: 992 - DNA, 4713 bp, unidentified
  source 1..4713: mol_type = other DNA
tacactacactaaatcagtaagttggcagcatcaccttttttttttttttttttttttggttacatgcatcagtcaataatgctttttttattttttttatttttttagatgcctccacagcatgaatgtactactcctttttcttcccctcccaccctcattgcatcccaggcttcccctgctccccacccccatgacagacatttttgatgattatcaacagaaactttatttctcatcggttcaggaacaatcggagggtagatggaaagaggaagggagggaaagagggagggaggaagaatcctgcgaaaaggaagggccagactgagggagaagaaaaacatgttcggggcaaaagggtaattctcaagtggggaatgccaaatgaaggggtgcttacatgggggcacaaaattccaaatcagccacagtggggtgaggtgagtatgagacgcaggtgggttgaatgaaggaaagttagtaccacttagggctacaggaccctggggttcttctgtcagaggattggggttcaggtttcaggctttagggtgtaacatgggggggcccagtaggggctatgctggttgcatggggaggccccaggcccctccccaagggcccctccttttgggggaatctcactgacgaggcagagtcgttcactgtagtctggctgcagactctcagccagtcccttagacacaccactccaggcctaaagacagatatgtccaggtcaggggtcaattaggggcaggaagtaaaagaccgagctctgtgccaaaggagtactcatgatgtctgcaaccactgtaattgattacagaagggatacacaggctcctgggcccccaataccagttgccatctgcctcattcaatctataatctgcacttctgtgtgtgtctctctctgtatagtccatgccccatttggtcggccacatcctgacagttagtgcagggcctccttccctctcctctctgcccccacccccacactctgtctgtcttgctggcaggcagttggcagttgatagactgcagcatgcttatgacagcgttctcaccgaaaagttcccgtggtattcagtaacaagatcctctaggttcttcagggtgggaattcggggcatcgtcctgacaggggagaaagagggagcaggagcacataggttaaagcttttttatcacccttctcccagttgtcccatatgaaataaagtgattctgtgttctctgtgcctgtggcttccttccatcaccaaaccctcttgggtaatctctcattacttactgtctcatcctttactcctaaagaccctgcaaaaccctcctctgctattgtcagctaccgttcccctcatttttctgggcttctccaaatctcaccgttccagccagaaatacacacagagaaggctgataatcaatcccatggagccaacagagataaccacggcttccaatgcaaacaggaaaggattctctatagaaaaaagaaaagcaaagtggaccttatatttgttgtgcccctactacatgccaggcactggtgccaggcaccgcgctaaagacatactctctgtttaatcctcacaacagctcctgtgaggcaggaacaattacctccatcttacatcttaggaaacagaatccaagagtttagggatgtggccaaggccaaagaggtagtatgtggcacagcctagatccagctggttccaaagccatcttcaccttgcaggctctctaggaatgcttcagggaaatcctatacattctatagcccccttgagtacccctcagcctccttctcaatccactcccctactctaacaacacgctaacccaaccctacacagaaaaaccttgatttctagaggttggggttagacagtgtggagagatggggcaccaagtttaggggctttagtgacagggaagtggagcaaaagacagtggtgttagaaaggctggggtgttgggctcatggattgggtcatgtgggcccattttaccttttgaagtattgctcccccagtggattgggtggctccattcactccaatgctgagcacttccacagagtgggttaaagcggctccgaacacgaaacgtgtagcgtttctgcccatccacactaggcaaggagaacttatgtctataatccactgattgttccttgaggagaaagaggatgagggaaagtgggtgtctatgagagaagggagaattaaaacatactcctgaacacccaccagtgtcatctctgctactgcccagtttctctctcatctcttgactactcaagccacactgctcccttcactgacttgaatctaatgcctcccctctggatccccttaatggcttccttttgtttacttgtctatctggtatcaggaagagtatgggtagggaatccctaatgaaaactcactggtgtcaggaatggtggctcacgcctgtaatcccagcactttgggaggccgaggtgggcagatcacctgaggtcaggagttcaagaccagcctgaccaacatggcaaaaccctgtctttactaaaaatacaaaaattagccaggcatggttgtgcatgctcccagctacttgggaggctgaagcaggagaatcacttgaaccagggagacagaggtcgcagtgagcccaagatcgccccactgcactcaagcctgggcaacagagtgaggctctgtctcaaaaaaaaaaaaaaaagaaagaaagaaagaaaagaaaagaaaaaaagaaaactcactggagaaaataggggggaaaggagttggaggagggagggtagggggtgagcagagaagctgggaggcagagaacaggagcttgatattaggtccttctatctgtctggttgaatcctttagccctactttcttggccttagctgctacattcacgtccctagtcactcacagtccagctgtggtcccagtcagtccggtactgcaccaagtgctccaaacagtggttcaagaatctgttgttccagttcagttctagctgggattcactcagtttgtgaagtgttaggttctctggagcccaggggatcactggagatatgtgtgcatatgtggtcattcccctggcctagacaagtcaggatcctgaaggtagtgcccctaatacctcctcccttcccatcatgatcccctacctcctcttttctgcccatgtacccttatgataaaagaacactactctgtagactccaatgtcccacagtatccctggtctcttgaccctttctttccaaattacccagattctgcagttttagcatctgtgtggcctgtctcctgggttcccgtgggtcctggagctgaacaacaaatgtttggtagaggtggatctcctttttttgcaactgacagccagaagtgatttcttcagagaatagatagtggctgcacttctggactttatcattatccgagttcttgtacctagaggagaaaggttggaaggaagaggaacagtggggccaatctgggtactgcagatatccagagcctagcctcatctcccctcaaccgacttatgacttaccccaggagaaaacagtggggtacctgggagacttgctaccctctctcttggtctctgatccaacccacctcttcttcatcccctccccctcgtcccttctcataccaataatgcagagtgaggttggtaggctggggctcagagctgctgttccaagtgcaattcatgtactcgacattgaacacaaaacactgaacctctgggaggggcagagtggaaacactgagggagtcagtgggcatagtggtcaggaagaaatctagattggggagaaaatgaaggcagggagggaaagagaaatgatggtcagaaggaggaggccaagcacggtggctcatgtctgtaatcctggtgctttgaaaggctgaggcaggaggatcactagaggccaggagtttgagaccagcctaggcaacatagtgagaccctgcctcaaaagaaagaaagaaacaaacaaacaagaaagaaagaaagaagaagtagcgtgaggcagggaaccctcccccttgcccttcccactccacttttcaattctgcccacatgattgtaatggccagtggcaggcaccagatctctgtacggccccttcccacagccacccttctcaccagccccctccagtcccagatttcccaccagctgtggtgtcttcattcccattgggcgtcagaattgtcgtgttcagccccactcccagcaggggcagctgcaggaataagagggatgtgaatggtaatgatggcttcaacatggcgcttgctcttcattccctgggtgtagtctgtctgtgtcaggaacctgggtccctcacccactacccctccccacccacacgtttcctctgtcatagcttccggtggaaagaaccttataaaccagggctttacagagggtgtggcaaatatgtgctgtgtgacacgggctaagtcctctaggagattaggtgctgctgtaaggtggtaaacagaaactaaagctggatatacaatagtgtcacagactcaaaaatcctcagcccacctagatcctgggaaggatctgttcactgcggccgcatgttctttttttttttttttttttttttggtgatgctgccaacttactgatttagttattcgtc

SEQ ID NO: 993 - DNA, 248 bp, unidentified
  source 1..248: mol_type = other DNA
cacgtgactaaatcagtaagttggcagcatcacctttctcgatcattattattttttggcgatcgcttttttttttttttttagcaaattggtaatactcctgcctccacagttttttttttttttttgcgatcgcctttttttttttttttttttttggtgatgctgccaacttactgatttagtcacgtgttttttttttttttttttttcagctataactaaatcagtaagttggcagcatcacc

SEQ ID NO: 994 - DNA, 245 bp, unidentified
  source 1..245: mol_type = other DNA
ggtgatgctgccaacttactgatttagtagtatgaatttttttttttttttttatcatcactaaatcagtaagttggcagcatcaccttttttttttttttttttttttggcgatcgcttttttttttttttttccttctcctctaaatcattaccttctataattttttttttttttttgcgatcgcctttttttttttttgatacatttggtgatgctgccaacttactgatttagtgatgat

SEQ ID NO: 995 - DNA, 4712 bp, unidentified
  source 1..4712: mol_type = other DNA
ttcatactactaaatcagtaagttggcagcatcaccttttttttttttttttttttttgaacatgcggccgcgtgaacagatccttcccaggatctaggtgggctgaggatttttgagtctgtgacactattgtatatccagctttagtttctgtttaccaccttacagcagcacctaatctcctagaggacttagcccgtgtcacacagcacatatttgccacaccctctgtaaagccctggtttataaggttctttccaccggaagctatgacagaggaaacgtgtgggtggggaggggtagtgggtgagggacccaggttcctgacacagacagactacacccagggaatgaagagcaagcgccatgttgaagccatcattaccattcacatccctcttattcctgcagctgcccctgctgggagtggggctgaacacgacaattctgacgcccaatgggaatgaagacaccacagctggtgggaaatctgggactggagggggctggtgagaagggtggctgtgggaaggggccgtacagagatctggtgcctgccactggccattacaatcatgtgggcagaattgaaaagtggagtgggaagggcaagggggagggttccctgcctcacgctacttcttctttctttctttcttgtttgtttgtttctttctttcttttgaggcagggtctcactatgttgcctaggctggtctcaaactcctggcctctagtgatcctcctgcctcagcctttcaaagcaccaggattacagacatgagccaccgtgcttggcctcctccttctgaccatcatttctctttccctccctgccttcattttctccccaatctagatttcttcctgaccactatgcccactgactccctcagtgtttccactctgcccctcccagaggttcagtgttttgtgttcaatgtcgagtacatgaattgcacttggaacagcagctctgagccccagcctaccaacctcactctgcattattggtatgagaagggacgagggggaggggatgaagaagaggtgggttggatcagagaccaagagagagggtagcaagtctcccaggtaccccactgttttctcctggggtaagtcataagtcggttgaggggagatgaggctaggctctggatatctgcagtacccagattggccccactgttcctcttccttccaacctttctcctctaggtacaagaactcggataatgataaagtccagaagtgcagccactatctattctctgaagaaatcacttctggctgtcagttgcaaaaaaaggagatccacctctaccaaacatttgttgttcagctccaggacccacgggaacccaggagacaggccacacagatgctaaaactgcagaatctgggtaatttggaaagaaagggtcaagagaccagggatactgtgggacattggagtctacagagtagtgttcttttatcataagggtacatgggcagaaaagaggaggtaggggatcatgatgggaagggaggaggtattaggggcactaccttcaggatcctgacttgtctaggccaggggaatgaccacatatgcacacatatctccagtgatcccctgggctccagagaacctaacacttcacaaactgagtgaatcccagctagaactgaactggaacaacagattcttgaaccactgtttggagcacttggtgcagtaccggactgactgggaccacagctggactgtgagtgactagggacgtgaatgtagcagctaaggccaagaaagtagggctaaaggattcaaccagacagatagaaggacctaatatcaagctcctgttctctgcctcccagcttctctgctcaccccctaccctccctcctccaactcctttcccccctattttctccagtgagttttctttttttcttttcttttctttctttctttcttttttttttttttttgagacagagcctcactctgttgcccaggcttgagtgcagtggggcgatcttgggctcactgcgacctctgtctccctggttcaagtgattctcctgcttcagcctcccaagtagctgggagcatgcacaaccatgcctggctaatttttgtatttttagtaaagacagggttttgccatgttggtcaggctggtcttgaactcctgacctcaggtgatctgcccacctcggcctcccaaagtgctgggattacaggcgtgagccaccattcctgacaccagtgagttttcattagggattccctacccatactcttcctgataccagatagacaagtaaacaaaaggaagccattaaggggatccagaggggaggcattagattcaagtcagtgaagggagcagtgtggcttgagtagtcaagagatgagagagaaactgggcagtagcagagatgacactggtgggtgttcaggagtatgttttaattctcccttctctcatagacacccactttccctcatcctctttctcctcaaggaacaatcagtggattatagacataagttctccttgcctagtgtggatgggcagaaacgctacacgtttcgtgttcggagccgctttaacccactctgtggaagtgctcagcattggagtgaatggagccacccaatccactgggggagcaatacttcaaaaggtaaaatgggcccacatgacccaatccatgagcccaacaccccagcctttctaacaccactgtcttttgctccacttccctgtcactaaagcccctaaacttggtgccccatctctccacactgtctaaccccaacctctagaaatcaaggtttttctgtgtagggttgggttagcgtgttgttagagtaggggagtggattgagaaggaggctgaggggtactcaagggggctatagaatgtataggatttccctgaagcattcctagagagcctgcaaggtgaagatggctttggaaccagctggatctaggctgtgccacatactacctctttggccttggccacatccctaaactcttggattctgtttcctaagatgtaagatggaggtaattgttcctgcctcacaggagctgttgtgaggattaaacagagagtatgtctttagcgcggtgcctggcaccagtgcctggcatgtagtaggggcacaacaaatataaggtccactttgcttttcttttttctatagagaatcctttcctgtttgcattggaagccgtggttatctctgttggctccatgggattgattatcagccttctctgtgtgtatttctggctggaacggtgagatttggagaagcccagaaaaatgaggggaacggtagctgacaatagcagaggagggttttgcagggtctttaggagtaaaggatgagacagtaagtaatgagagattacccaagagggtttggtgatggaaggaagccacaggcacagagaacacagaatcactttatttcatatgggacaactgggagaagggtgataaaaaagctttaacctatgtgctcctgctccctctttctcccctgtcaggacgatgccccgaattcccaccctgaagaacctagaggatcttgttactgaataccacgggaacttttcggtgagaacgctgtcataagcatgctgcagtctatcaactgccaactgcctgccagcaagacagacagagtgtgggggtgggggcagagaggagagggaaggaggccctgcactaactgtcaggatgtggccgaccaaatggggcatggactatacagagagagacacacacagaagtgcagattatagattgaatgaggcagatggcaactggtattgggggcccaggagcctgtgtatcccttctgtaatcaattacagtggttgcagacatcatgagtactcctttggcacagagctcggtcttttacttcctgcccctaattgacccctgacctggacatatctgtctttaggcctggagtggtgtgtctaagggactggctgagagtctgcagccagactacagtgaacgactctgcctcgtcagtgagattcccccaaaaggaggggcccttggggaggggcctggggcctccccatgcaaccagcatagcccctactgggcccccccatgttacaccctaaagcctgaaacctgaaccccaatcctctgacagaagaaccccagggtcctgtagccctaagtggtactaactttccttcattcaacccacctgcgtctcatactcacctcaccccactgtggctgatttggaattttgtgcccccatgtaagcaccccttcatttggcattccccacttgagaattacccttttgccccgaacatgtttttcttctccctcagtctggcccttccttttcgcaggattcttcctccctccctctttccctcccttcctctttccatctaccctccgattgttcctgaaccgatgagaaataaagtttctgttgataatcatcaaaaatgtctgtcatgggggtggggagcaggggaagcctgggatgcaatgagggtgggaggggaagaaaaaggagtagtacattcatgctgtggaggcatctaaaaaaataaaaaaaataaaaaaagcattattgactgatgcatgtaacctttttttttttttttttttttttggtgatgctgccaacttactgatttagttatagctg

SEQ ID NO: 996 - DNA, 245 bp, unidentified
  source 1..245: mol_type = other DNA
actaaatcagtaagttggcagcatcaccgtagtgtatttttttttttttttttatcatcggtgatgctgccaacttactgatttagtttttttttttttttttttttttggcgatcgcttttttttttttttttgctagaaagagtactgttctggaaactgacttttttttttttttttgcgatcgcctttttttttttttgatacatttactaaatcagtaagttggcagcatcaccgatgat

SEQ ID NO: 997 - DNA, 248 bp, unidentified
  source 1..248: mol_type = other DNA
cacgtgggtgatgctgccaacttactgatttagttttctcgatcattattattttttggcgatcgcttttttttttttttttgttgagaatggtgctagtggtagtgaacagttttttttttttttttgcgatcgcctttttttttttttttttttttactaaatcagtaagttggcagcatcacccacgtgttttttttttttttttttttgacgaataggtgatgctgccaacttactgatttagt

SEQ ID NO: 998 - DNA, 4713 bp, unidentified
  source 1..4713: mol_type = other DNA
tacactacggtgatgctgccaacttactgatttagtttttttttttttttttttttttggttacatgcatcagtcaataatgctttttttattttttttatttttttagatgcctccacagcatgaatgtactactcctttttcttcccctcccaccctcattgcatcccaggcttcccctgctccccacccccatgacagacatttttgatgattatcaacagaaactttatttctcatcggttcaggaacaatcggagggtagatggaaagaggaagggagggaaagagggagggaggaagaatcctgcgaaaaggaagggccagactgagggagaagaaaaacatgttcggggcaaaagggtaattctcaagtggggaatgccaaatgaaggggtgcttacatgggggcacaaaattccaaatcagccacagtggggtgaggtgagtatgagacgcaggtgggttgaatgaaggaaagttagtaccacttagggctacaggaccctggggttcttctgtcagaggattggggttcaggtttcaggctttagggtgtaacatgggggggcccagtaggggctatgctggttgcatggggaggccccaggcccctccccaagggcccctccttttgggggaatctcactgacgaggcagagtcgttcactgtagtctggctgcagactctcagccagtcccttagacacaccactccaggcctaaagacagatatgtccaggtcaggggtcaattaggggcaggaagtaaaagaccgagctctgtgccaaaggagtactcatgatgtctgcaaccactgtaattgattacagaagggatacacaggctcctgggcccccaataccagttgccatctgcctcattcaatctataatctgcacttctgtgtgtgtctctctctgtatagtccatgccccatttggtcggccacatcctgacagttagtgcagggcctccttccctctcctctctgcccccacccccacactctgtctgtcttgctggcaggcagttggcagttgatagactgcagcatgcttatgacagcgttctcaccgaaaagttcccgtggtattcagtaacaagatcctctaggttcttcagggtgggaattcggggcatcgtcctgacaggggagaaagagggagcaggagcacataggttaaagcttttttatcacccttctcccagttgtcccatatgaaataaagtgattctgtgttctctgtgcctgtggcttccttccatcaccaaaccctcttgggtaatctctcattacttactgtctcatcctttactcctaaagaccctgcaaaaccctcctctgctattgtcagctaccgttcccctcatttttctgggcttctccaaatctcaccgttccagccagaaatacacacagagaaggctgataatcaatcccatggagccaacagagataaccacggcttccaatgcaaacaggaaaggattctctatagaaaaaagaaaagcaaagtggaccttatatttgttgtgcccctactacatgccaggcactggtgccaggcaccgcgctaaagacatactctctgtttaatcctcacaacagctcctgtgaggcaggaacaattacctccatcttacatcttaggaaacagaatccaagagtttagggatgtggccaaggccaaagaggtagtatgtggcacagcctagatccagctggttccaaagccatcttcaccttgcaggctctctaggaatgcttcagggaaatcctatacattctatagcccccttgagtacccctcagcctccttctcaatccactcccctactctaacaacacgctaacccaaccctacacagaaaaaccttgatttctagaggttggggttagacagtgtggagagatggggcaccaagtttaggggctttagtgacagggaagtggagcaaaagacagtggtgttagaaaggctggggtgttgggctcatggattgggtcatgtgggcccattttaccttttgaagtattgctcccccagtggattgggtggctccattcactccaatgctgagcacttccacagagtgggttaaagcggctccgaacacgaaacgtgtagcgtttctgcccatccacactaggcaaggagaacttatgtctataatccactgattgttccttgaggagaaagaggatgagggaaagtgggtgtctatgagagaagggagaattaaaacatactcctgaacacccaccagtgtcatctctgctactgcccagtttctctctcatctcttgactactcaagccacactgctcccttcactgacttgaatctaatgcctcccctctggatccccttaatggcttccttttgtttacttgtctatctggtatcaggaagagtatgggtagggaatccctaatgaaaactcactggtgtcaggaatggtggctcacgcctgtaatcccagcactttgggaggccgaggtgggcagatcacctgaggtcaggagttcaagaccagcctgaccaacatggcaaaaccctgtctttactaaaaatacaaaaattagccaggcatggttgtgcatgctcccagctacttgggaggctgaagcaggagaatcacttgaaccagggagacagaggtcgcagtgagcccaagatcgccccactgcactcaagcctgggcaacagagtgaggctctgtctcaaaaaaaaaaaaaaaagaaagaaagaaagaaaagaaaagaaaaaaagaaaactcactggagaaaataggggggaaaggagttggaggagggagggtagggggtgagcagagaagctgggaggcagagaacaggagcttgatattaggtccttctatctgtctggttgaatcctttagccctactttcttggccttagctgctacattcacgtccctagtcactcacagtccagctgtggtcccagtcagtccggtactgcaccaagtgctccaaacagtggttcaagaatctgttgttccagttcagttctagctgggattcactcagtttgtgaagtgttaggttctctggagcccaggggatcactggagatatgtgtgcatatgtggtcattcccctggcctagacaagtcaggatcctgaaggtagtgcccctaatacctcctcccttcccatcatgatcccctacctcctcttttctgcccatgtacccttatgataaaagaacactactctgtagactccaatgtcccacagtatccctggtctcttgaccctttctttccaaattacccagattctgcagttttagcatctgtgtggcctgtctcctgggttcccgtgggtcctggagctgaacaacaaatgtttggtagaggtggatctcctttttttgcaactgacagccagaagtgatttcttcagagaatagatagtggctgcacttctggactttatcattatccgagttcttgtacctagaggagaaaggttggaaggaagaggaacagtggggccaatctgggtactgcagatatccagagcctagcctcatctcccctcaaccgacttatgacttaccccaggagaaaacagtggggtacctgggagacttgctaccctctctcttggtctctgatccaacccacctcttcttcatcccctccccctcgtcccttctcataccaataatgcagagtgaggttggtaggctggggctcagagctgctgttccaagtgcaattcatgtactcgacattgaacacaaaacactgaacctctgggaggggcagagtggaaacactgagggagtcagtgggcatagtggtcaggaagaaatctagattggggagaaaatgaaggcagggagggaaagagaaatgatggtcagaaggaggaggccaagcacggtggctcatgtctgtaatcctggtgctttgaaaggctgaggcaggaggatcactagaggccaggagtttgagaccagcctaggcaacatagtgagaccctgcctcaaaagaaagaaagaaacaaacaaacaagaaagaaagaaagaagaagtagcgtgaggcagggaaccctcccccttgcccttcccactccacttttcaattctgcccacatgattgtaatggccagtggcaggcaccagatctctgtacggccccttcccacagccacccttctcaccagccccctccagtcccagatttcccaccagctgtggtgtcttcattcccattgggcgtcagaattgtcgtgttcagccccactcccagcaggggcagctgcaggaataagagggatgtgaatggtaatgatggcttcaacatggcgcttgctcttcattccctgggtgtagtctgtctgtgtcaggaacctgggtccctcacccactacccctccccacccacacgtttcctctgtcatagcttccggtggaaagaaccttataaaccagggctttacagagggtgtggcaaatatgtgctgtgtgacacgggctaagtcctctaggagattaggtgctgctgtaaggtggtaaacagaaactaaagctggatatacaatagtgtcacagactcaaaaatcctcagcccacctagatcctgggaaggatctgttcactgcggccgcatgttctttttttttttttttttttttttactaaatcagtaagttggcagcatcacctattcgtc

SEQ ID NO: 999 - DNA, 248 bp, unidentified
  source 1..248: mol_type = other DNA
cacgtgggtgatgctgccaacttactgatttagttttctcgatcattattattttttggcgatcgcttttttttttttttttagcaaattggtaatactcctgcctccacagttttttttttttttttgcgatcgcctttttttttttttttttttttactaaatcagtaagttggcagcatcacccacgtgttttttttttttttttttttcagctataggtgatgctgccaacttactgatttagt

SEQ ID NO: 1000 - DNA, 245 bp, unidentified
  source 1..245: mol_type = other DNA
actaaatcagtaagttggcagcatcaccagtatgaatttttttttttttttttatcatcggtgatgctgccaacttactgatttagtttttttttttttttttttttttggcgatcgcttttttttttttttttccttctcctctaaatcattaccttctataattttttttttttttttgcgatcgcctttttttttttttgatacatttactaaatcagtaagttggcagcatcaccgatgat

SEQ ID NO: 1001 - DNA, 4712 bp, unidentified
  source 1..4712: mol_type = other DNA
ttcatactggtgatgctgccaacttactgatttagtttttttttttttttttttttttgaacatgcggccgcgtgaacagatccttcccaggatctaggtgggctgaggatttttgagtctgtgacactattgtatatccagctttagtttctgtttaccaccttacagcagcacctaatctcctagaggacttagcccgtgtcacacagcacatatttgccacaccctctgtaaagccctggtttataaggttctttccaccggaagctatgacagaggaaacgtgtgggtggggaggggtagtgggtgagggacccaggttcctgacacagacagactacacccagggaatgaagagcaagcgccatgttgaagccatcattaccattcacatccctcttattcctgcagctgcccctgctgggagtggggctgaacacgacaattctgacgcccaatgggaatgaagacaccacagctggtgggaaatctgggactggagggggctggtgagaagggtggctgtgggaaggggccgtacagagatctggtgcctgccactggccattacaatcatgtgggcagaattgaaaagtggagtgggaagggcaagggggagggttccctgcctcacgctacttcttctttctttctttcttgtttgtttgtttctttctttcttttgaggcagggtctcactatgttgcctaggctggtctcaaactcctggcctctagtgatcctcctgcctcagcctttcaaagcaccaggattacagacatgagccaccgtgcttggcctcctccttctgaccatcatttctctttccctccctgccttcattttctccccaatctagatttcttcctgaccactatgcccactgactccctcagtgtttccactctgcccctcccagaggttcagtgttttgtgttcaatgtcgagtacatgaattgcacttggaacagcagctctgagccccagcctaccaacctcactctgcattattggtatgagaagggacgagggggaggggatgaagaagaggtgggttggatcagagaccaagagagagggtagcaagtctcccaggtaccccactgttttctcctggggtaagtcataagtcggttgaggggagatgaggctaggctctggatatctgcagtacccagattggccccactgttcctcttccttccaacctttctcctctaggtacaagaactcggataatgataaagtccagaagtgcagccactatctattctctgaagaaatcacttctggctgtcagttgcaaaaaaaggagatccacctctaccaaacatttgttgttcagctccaggacccacgggaacccaggagacaggccacacagatgctaaaactgcagaatctgggtaatttggaaagaaagggtcaagagaccagggatactgtgggacattggagtctacagagtagtgttcttttatcataagggtacatgggcagaaaagaggaggtaggggatcatgatgggaagggaggaggtattaggggcactaccttcaggatcctgacttgtctaggccaggggaatgaccacatatgcacacatatctccagtgatcccctgggctccagagaacctaacacttcacaaactgagtgaatcccagctagaactgaactggaacaacagattcttgaaccactgtttggagcacttggtgcagtaccggactgactgggaccacagctggactgtgagtgactagggacgtgaatgtagcagctaaggccaagaaagtagggctaaaggattcaaccagacagatagaaggacctaatatcaagctcctgttctctgcctcccagcttctctgctcaccccctaccctccctcctccaactcctttcccccctattttctccagtgagttttctttttttcttttcttttctttctttctttcttttttttttttttttgagacagagcctcactctgttgcccaggcttgagtgcagtggggcgatcttgggctcactgcgacctctgtctccctggttcaagtgattctcctgcttcagcctcccaagtagctgggagcatgcacaaccatgcctggctaatttttgtatttttagtaaagacagggttttgccatgttggtcaggctggtcttgaactcctgacctcaggtgatctgcccacctcggcctcccaaagtgctgggattacaggcgtgagccaccattcctgacaccagtgagttttcattagggattccctacccatactcttcctgataccagatagacaagtaaacaaaaggaagccattaaggggatccagaggggaggcattagattcaagtcagtgaagggagcagtgtggcttgagtagtcaagagatgagagagaaactgggcagtagcagagatgacactggtgggtgttcaggagtatgttttaattctcccttctctcatagacacccactttccctcatcctctttctcctcaaggaacaatcagtggattatagacataagttctccttgcctagtgtggatgggcagaaacgctacacgtttcgtgttcggagccgctttaacccactctgtggaagtgctcagcattggagtgaatggagccacccaatccactgggggagcaatacttcaaaaggtaaaatgggcccacatgacccaatccatgagcccaacaccccagcctttctaacaccactgtcttttgctccacttccctgtcactaaagcccctaaacttggtgccccatctctccacactgtctaaccccaacctctagaaatcaaggtttttctgtgtagggttgggttagcgtgttgttagagtaggggagtggattgagaaggaggctgaggggtactcaagggggctatagaatgtataggatttccctgaagcattcctagagagcctgcaaggtgaagatggctttggaaccagctggatctaggctgtgccacatactacctctttggccttggccacatccctaaactcttggattctgtttcctaagatgtaagatggaggtaattgttcctgcctcacaggagctgttgtgaggattaaacagagagtatgtctttagcgcggtgcctggcaccagtgcctggcatgtagtaggggcacaacaaatataaggtccactttgcttttcttttttctatagagaatcctttcctgtttgcattggaagccgtggttatctctgttggctccatgggattgattatcagccttctctgtgtgtatttctggctggaacggtgagatttggagaagcccagaaaaatgaggggaacggtagctgacaatagcagaggagggttttgcagggtctttaggagtaaaggatgagacagtaagtaatgagagattacccaagagggtttggtgatggaaggaagccacaggcacagagaacacagaatcactttatttcatatgggacaactgggagaagggtgataaaaaagctttaacctatgtgctcctgctccctctttctcccctgtcaggacgatgccccgaattcccaccctgaagaacctagaggatcttgttactgaataccacgggaacttttcggtgagaacgctgtcataagcatgctgcagtctatcaactgccaactgcctgccagcaagacagacagagtgtgggggtgggggcagagaggagagggaaggaggccctgcactaactgtcaggatgtggccgaccaaatggggcatggactatacagagagagacacacacagaagtgcagattatagattgaatgaggcagatggcaactggtattgggggcccaggagcctgtgtatcccttctgtaatcaattacagtggttgcagacatcatgagtactcctttggcacagagctcggtcttttacttcctgcccctaattgacccctgacctggacatatctgtctttaggcctggagtggtgtgtctaagggactggctgagagtctgcagccagactacagtgaacgactctgcctcgtcagtgagattcccccaaaaggaggggcccttggggaggggcctggggcctccccatgcaaccagcatagcccctactgggcccccccatgttacaccctaaagcctgaaacctgaaccccaatcctctgacagaagaaccccagggtcctgtagccctaagtggtactaactttccttcattcaacccacctgcgtctcatactcacctcaccccactgtggctgatttggaattttgtgcccccatgtaagcaccccttcatttggcattccccacttgagaattacccttttgccccgaacatgtttttcttctccctcagtctggcccttccttttcgcaggattcttcctccctccctctttccctcccttcctctttccatctaccctccgattgttcctgaaccgatgagaaataaagtttctgttgataatcatcaaaaatgtctgtcatgggggtggggagcaggggaagcctgggatgcaatgagggtgggaggggaagaaaaaggagtagtacattcatgctgtggaggcatctaaaaaaataaaaaaaataaaaaaagcattattgactgatgcatgtaacctttttttttttttttttttttttactaaatcagtaagttggcagcatcacctatagctg

SEQ ID NO: 1002 - DNA, 239 bp, unidentified
  source 1..239: mol_type = other DNA
ggtgatgctgccaacttactgatttagtgtagtgtatttttttttttttttttatcatcactaaatcagtaagttggcagcatcaccttttttttttttttttttttttgcgaccttttttttttttttttgctagaaagagtactgttctggaaactgacttttttttttttttttggtcgctttttttttttttgatacatttggtgatgctgccaacttactgatttagtgatgat

SEQ ID NO: 1003 - DNA, 241 bp, unidentified
  source 1..241: mol_type = other DNA
cacgtgactaaatcagtaagttggcagcatcacctttctcgatcattattattttttgcgaccttttttttttttttttgttgagaatggtgctagtggtagtgaacagtttttttttttttttggtcgctttttttttttttttttttttggtgatgctgccaacttactgatttagtcacgtgttttttttttttttttttttgacgaataactaaatcagtaagttggcagcatcacc

SEQ ID NO: 1004 - DNA, 4713 bp, unidentified; identical to SEQ ID NO: 992
  source 1..4713: mol_type = other DNA

SEQ ID NO: 1005 - DNA, 242 bp, unidentified
  source 1..242: mol_type = other DNA
cacgtgactaaatcagtaagttggcagcatcacctttctcgatcattattattttttgcgaccttttttttttttttttagcaaattggtaatactcctgcctccacagttttttttttttttttggtcgctttttttttttttttttttttggtgatgctgccaacttactgatttagtcacgtgttttttttttttttttttttcagctataactaaatcagtaagttggcagcatcacc

SEQ ID NO: 1006 - DNA, 239 bp, unidentified
  source 1..239: mol_type = other DNA
ggtgatgctgccaacttactgatttagtagtatgaatttttttttttttttttatcatcactaaatcagtaagttggcagcatcaccttttttttttttttttttttttgcgaccttttttttttttttttccttctcctctaaatcattaccttctataattttttttttttttttggtcgctttttttttttttgatacatttggtgatgctgccaacttactgatttagtgatgat

SEQ ID NO: 1007 - DNA, 4712 bp, unidentified; identical to SEQ ID NO: 995
  source 1..4712: mol_type = other DNA

SEQ ID NO: 1008 - DNA, 239 bp, unidentified
  source 1..239: mol_type = other DNA
actaaatcagtaagttggcagcatcaccgtagtgtatttttttttttttttttatcatcggtgatgctgccaacttactgatttagtttttttttttttttttttttttgcgaccttttttttttttttttgctagaaagagtactgttctggaaactgacttttttttttttttttggtcgctttttttttttttgatacatttactaaatcagtaagttggcagcatcaccgatgat

SEQ ID NO: 1009 - DNA, 242 bp, unidentified
  source 1..242: mol_type = other DNA
cacgtgggtgatgctgccaacttactgatttagttttctcgatcattattattttttgcgaccttttttttttttttttgttgagaatggtgctagtggtagtgaacagttttttttttttttttggtcgctttttttttttttttttttttactaaatcagtaagttggcagcatcacccacgtgttttttttttttttttttttgacgaataggtgatgctgccaacttactgatttagt

SEQ ID NO: 1010 - DNA, 4713 bp, unidentified; identical to SEQ ID NO: 998
  source 1..4713: mol_type = other DNA

SEQ ID NO: 1011 - DNA, 242 bp, unidentified
  source 1..242: mol_type = other DNA
cacgtgggtgatgctgccaacttactgatttagttttctcgatcattattattttttgcgaccttttttttttttttttagcaaattggtaatactcctgcctccacagttttttttttttttttggtcgctttttttttttttttttttttactaaatcagtaagttggcagcatcacccacgtgttttttttttttttttttttcagctataggtgatgctgccaacttactgatttagt

SEQ ID NO: 1012 - DNA, 239 bp, unidentified
  source 1..239: mol_type = other DNA
actaaatcagtaagttggcagcatcaccagtatgaatttttttttttttttttatcatcggtgatgctgccaacttactgatttagtttttttttttttttttttttttgcgaccttttttttttttttttccttctcctctaaatcattaccttctataattttttttttttttttggtcgctttttttttttttgatacatttactaaatcagtaagttggcagcatcaccgatgat

SEQ ID NO: 1013 - DNA, 4712 bp, unidentified; identical to SEQ ID NO: 1001
  source 1..4712: mol_type = other DNA

SEQ ID NO: 1014 - DNA, 251 bp, unidentified
  source 1..251: mol_type = other DNA
ggtgatgctgccaacttactgatttagtgtagtgtatttttttttttttttttatcatcactaaatcagtaagttggcagcatcaccttttttttttttttttttttttgcggcgatcggcttttttttttttttttgctagaaagagtactgttctggaaactgacttttttttttttttttgccgatcgccgctttttttttttttgatacatttggtgatgctgccaacttactgatttagtgatgat

SEQ ID NO: 1015 - DNA, 254 bp, unidentified
  source 1..254: mol_type = other DNA
cacgtgactaaatcagtaagttggcagcatcacctttctcgatcattattattttttgcggcgatcggcttttttttttttttttgttgagaatggtgctagtggtagtgaacagttttttttttttttttgccgatcgccgctttttttttttttttttttttggtgatgctgccaacttactgatttagtcacgtgttttttttttttttttttttgacgaataactaaatcagtaagttggcagcatcacc

SEQ ID NO: 1016 - DNA, 4713 bp, unidentified; identical to SEQ ID NO: 992
  source 1..4713: mol_type = other DNA

SEQ ID NO: 1017 - DNA, 254 bp, unidentified
  source 1..254: mol_type = other DNA
cacgtgactaaatcagtaagttggcagcatcacctttctcgatcattattattttttgcggcgatcggcttttttttttttttttagcaaattggtaatactcctgcctccacagttttttttttttttttgccgatcgccgctttttttttttttttttttttggtgatgctgccaacttactgatttagtcacgtgttttttttttttttttttttcagctataactaaatcagtaagttggcagcatcacc

SEQ ID NO: 1018 - DNA, 251 bp, unidentified
  source 1..251: mol_type = other DNA
ggtgatgctgccaacttactgatttagtagtatgaatttttttttttttttttatcatcactaaatcagtaagttggcagcatcaccttttttttttttttttttttttgcggcgatcggcttttttttttttttttccttctcctctaaatcattaccttctataattttttttttttttttgccgatcgccgctttttttttttttgatacatttggtgatgctgccaacttactgatttagtgatgat

SEQ ID NO: 1019 - DNA, 4712 bp, unidentified; identical to SEQ ID NO: 995
  source 1..4712: mol_type = other DNA

SEQ ID NO: 1020 - DNA, 251 bp, unidentified
  source 1..251: mol_type = other DNA
actaaatcagtaagttggcagcatcaccgtagtgtatttttttttttttttttatcatcggtgatgctgccaacttactgatttagtttttttttttttttttttttttgcggcgatcggcttttttttttttttttgctagaaagagtactgttctggaaactgacttttttttttttttttgccgatcgccgctttttttttttttgatacatttactaaatcagtaagttggcagcatcaccgatgat

SEQ ID NO: 1021 - DNA, 254 bp, unidentified
  source 1..254: mol_type = other DNA
cacgtgggtgatgctgccaacttactgatttagttttctcgatcattattattttttgcggcgatcggcttttttttttttttttgttgagaatggtgctagtggtagtgaacagttttttttttttttttgccgatcgccgctttttttttttttttttttttactaaatcagtaagttggcagcatcacccacgtgttttttttttttttttttttgacgaataggtgatgctgccaacttactgatttagt

SEQ ID NO: 1022 - DNA, 4713 bp, unidentified; identical to SEQ ID NO: 998
  source 1..4713: mol_type = other DNA

SEQ ID NO: 1023 - DNA, 254 bp, unidentified
  source 1..254: mol_type = other DNA
cacgtgggtgatgctgccaacttactgatttagttttctcgatcattattattttttgcggcgatcggcttttttttttttttttagcaaattggtaatactcctgcctccacagttttttttttttttttgccgatcgccgctttttttttttttttttttttactaaatcagtaagttggcagcatcacccacgtgttttttttttttttttttttcagctataggtgatgctgccaacttactgatttagt

SEQ ID NO: 1024 - DNA, 251 bp, unidentified
  source 1..251: mol_type = other DNA
actaaatcagtaagttggcagcatcaccagtatgaatttttttttttttttttatcatcggtgatgctgccaacttactgatttagtttttttttttttttttttttttgcggcgatcggcttttttttttttttttccttctcctctaaatcattaccttctataattttttttttttttttgccgatcgccgctttttttttttttgatacatttactaaatcagtaagttggcagcatcaccgatgat

SEQ ID NO: 1025 - DNA, 4712 bp, unidentified; identical to SEQ ID NO: 1001
  source 1..4712: mol_type = other DNA

SEQ ID NO: 1026 - DNA, 245 bp, unidentified
  source 1..245: mol_type = other DNA
ggtaatgactccaacttattgatagtgtgtagtgtatttttttttttttttttatcatcacactatcaataagttggagtcattaccttttttttttttttttttttttggcgatcgcttttttttttttttttgctagaaagagtactgttctggaaactgacttttttttttttttttgcgatcgcctttttttttttttgatacatttggtaatgactccaacttattgatagtgtgatgat

SEQ ID NO: 1027 - DNA, 248 bp, unidentified
  source 1..248: mol_type = other DNA
cacgtgacactatcaataagttggagtcattacctttctcgatcattattattttttggcgatcgcttttttttttttttttgttgagaatggtgctagtggtagtgaacagttttttttttttttttgcgatcgcctttttttttttttttttttttggtaatgactccaacttattgatagtgtcacgtgttttttttttttttttttttgacgaataacactatcaataagttggagtcattacc

SEQ ID NO: 1028 - DNA, 4713 bp, unidentified
  source 1..4713: mol_type = other DNA
tacactacacactatcaataagttggagtcattaccttttttttttttttttttttttggttacatgcatcagtcaataatgctttttttattttttttatttttttagatgcctccacagcatgaatgtactactcctttttcttcccctcccaccctcattgcatcccaggcttcccctgctccccacccccatgacagacatttttgatgattatcaacagaaactttatttctcatcggttcaggaacaatcggagggtagatggaaagaggaagggagggaaagagggagggaggaagaatcctgcgaaaaggaagggccagactgagggagaagaaaaacatgttcggggcaaaagggtaattctcaagtggggaatgccaaatgaaggggtgcttacatgggggcacaaaattccaaatcagccacagtggggtgaggtgagtatgagacgcaggtgggttgaatgaaggaaagttagtaccacttagggctacaggaccctggggttcttctgtcagaggattggggttcaggtttcaggctttagggtgtaacatgggggggcccagtaggggctatgctggttgcatggggaggccccaggcccctccccaagggcccctccttttgggggaatctcactgacgaggcagagtcgttcactgtagtctggctgcagactctcagccagtcccttagacacaccactccaggcctaaagacagatatgtccaggtcaggggtcaattaggggcaggaagtaaaagaccgagctctgtgccaaaggagtactcatgatgtctgcaaccactgtaattgattacagaagggatacacaggctcctgggcccccaataccagttgccatctgcctcattcaatctataatctgcacttctgtgtgtgtctctctctgtatagtccatgccccatttggtcggccacatcctgacagttagtgcagggcctccttccctctcctctctgcccccacccccacactctgtctgtcttgctggcaggcagttggcagttgatagactgcagcatgcttatgacagcgttctcaccgaaaagttcccgtggtattcagtaacaagatcctctaggttcttcagggtgggaattcggggcatcgtcctgacaggggagaaagagggagcaggagcacataggttaaagcttttttatcacccttctcccagttgtcccatatgaaataaagtgattctgtgttctctgtgcctgtggcttccttccatcaccaaaccctcttgggtaatctctcattacttactgtctcatcctttactcctaaagaccctgcaaaaccctcctctgctattgtcagctaccgttcccctcatttttctgggcttctccaaatctcaccgttccagccagaaatacacacagagaaggctgataatcaatcccatggagccaacagagataaccacggcttccaatgcaaacaggaaaggattctctatagaaaaaagaaaagcaaagtggaccttatatttgttgtgcccctactacatgccaggcactggtgccaggcaccgcgctaaagacatactctctgtttaatcctcacaacagctcctgtgaggcaggaacaattacctccatcttacatcttaggaaacagaatccaagagtttagggatgtggccaaggccaaagaggtagtatgtggcacagcctagatccagctggttccaaagccatcttcaccttgcaggctctctaggaatgcttcagggaaatcctatacattctatagcccccttgagtacccctcagcctccttctcaatccactcccctactctaacaacacgctaacccaaccctacacagaaaaaccttgatttctagaggttggggttagacagtgtggagagatggggcaccaagtttaggggctttagtgacagggaagtggagcaaaagacagtggtgttagaaaggctggggtgttgggctcatggattgggtcatgtgggcccattttaccttttgaagtattgctcccccagtggattgggtggctccattcactccaatgctgagcacttccacagagtgggttaaagcggctccgaacacgaaacgtgtagcgtttctgcccatccacactaggcaaggagaacttatgtctataatccactgattgttccttgaggagaaagaggatgagggaaagtgggtgtctatgagagaagggagaattaaaacatactcctgaacacccaccagtgtcatctctgctactgcccagtttctctctcatctcttgactactcaagccacactgctcccttcactgacttgaatctaatgcctcccctctggatccccttaatggcttccttttgtttacttgtctatctggtatcaggaagagtatgggtagggaatccctaatgaaaactcactggtgtcaggaatggtggctcacgcctgtaatcccagcactttgggaggccgaggtgggcagatcacctgaggtcaggagttcaagaccagcctgaccaacatggcaaaaccctgtctttactaaaaatacaaaaattagccaggcatggttgtgcatgctcccagctacttgggaggctgaagcaggagaatcacttgaaccagggagacagaggtcgcagtgagcccaagatcgccccactgcactcaagcctgggcaacagagtgaggctctgtctcaaaaaaaaaaaaaaaagaaagaaagaaagaaaagaaaagaaaaaaagaaaactcactggagaaaataggggggaaaggagttggaggagggagggtagggggtgagcagagaagctgggaggcagagaacaggagcttgatattaggtccttctatctgtctggttgaatcctttagccctactttcttggccttagctgctacattcacgtccctagtcactcacagtccagctgtggtcccagtcagtccggtactgcaccaagtgctccaaacagtggttcaagaatctgttgttccagttcagttctagctgggattcactcagtttgtgaagtgttaggttctctggagcccaggggatcactggagatatgtgtgcatatgtggtcattcccctggcctagacaagtcaggatcctgaaggtagtgcccctaatacctcctcccttcccatcatgatcccctacctcctcttttctgcccatgtacccttatgataaaagaacactactctgtagactccaatgtcccacagtatccctggtctcttgaccctttctttccaaattacccagattctgcagttttagcatctgtgtggcctgtctcctgggttcccgtgggtcctggagctgaacaacaaatgtttggtagaggtggatctcctttttttgcaactgacagccagaagtgatttcttcagagaatagatagtggctgcacttctggactttatcattatccgagttcttgtacctagaggagaaaggttggaaggaagaggaacagtggggccaatctgggtactgcagatatccagagcctagcctcatctcccctcaaccgacttatgacttaccccaggagaaaacagtggggtacctgggagacttgctaccctctctcttggtctctgatccaacccacctcttcttcatcccctccccctcgtcccttctcataccaataatgcagagtgaggttggtaggctggggctcagagctgctgttccaagtgcaattcatgtactcgacattgaacacaaaacactgaacctctgggaggggcagagtggaaacactgagggagtcagtgggcatagtggtcaggaagaaatctagattggggagaaaatgaaggcagggagggaaagagaaatgatggtcagaaggaggaggccaagcacggtggctcatgtctgtaatcctggtgctttgaaaggctgaggcaggaggatcactagaggccaggagtttgagaccagcctaggcaacatagtgagaccctgcctcaaaagaaagaaagaaacaaacaaacaagaaagaaagaaagaagaagtagcgtgaggcagggaaccctcccccttgcccttcccactccacttttcaattctgcccacatgattgtaatggccagtggcaggcaccagatctctgtacggccccttcccacagccacccttctcaccagccccctccagtcccagatttcccaccagctgtggtgtcttcattcccattgggcgtcagaattgtcgtgttcagccccactcccagcaggggcagctgcaggaataagagggatgtgaatggtaatgatggcttcaacatggcgcttgctcttcattccctgggtgtagtctgtctgtgtcaggaacctgggtccctcacccactacccctccccacccacacgtttcctctgtcatagcttccggtggaaagaaccttataaaccagggctttacagagggtgtggcaaatatgtgctgtgtgacacgggctaagtcctctaggagattaggtgctgctgtaaggtggtaaacagaaactaaagctggatatacaatagtgtcacagactcaaaaatcctcagcccacctagatcctgggaaggatctgttcactgcggccgcatgttctttttttttttttttttttttttggtaatgactccaacttattgatagtgttattcgtc

SEQ ID NO: 1029 - DNA, 248 bp, unidentified
  source 1..248: mol_type = other DNA
cacgtgacactatcaataagttggagtcattacctttctcgatcattattattttttggcgatcgcttttttttttttttttagcaaattggtaatactcctgcctccacagttttttttttttttttgcgatcgcctttttttttttttttttttttggtaatgactccaacttattgatagtgtcacgtgttttttttttttttttttttcagctataacactatcaataagttggagtcattacc

SEQ ID NO: 1030 - DNA, 245 bp, unidentified
  source 1..245: mol_type = other DNA
ggtaatgactccaacttattgatagtgtagtatgaatttttttttttttttttatcatcacactatcaataagttggagtcattaccttttttttttttttttttttttggcgatcgcttttttttttttttttccttctcctctaaatcattaccttctataattttttttttttttttgcgatcgcctttttttttttttgatacatttggtaatgactccaacttattgatagtgtgatgat

SEQ ID NO: 1031 - DNA, 4712 bp, unidentified
  source 1..4712: mol_type = other DNA
ttcatactacactatcaataagttggagtcattaccttttttttttttttttttttttgaacatgcggccgcgtgaacagatccttcccaggatctaggtgggctgaggatttttgagtctgtgacactattgtatatccagctttagtttctgtttaccaccttacagcagcacctaatctcctagaggacttagcccgtgtcacacagcacatatttgccacaccctctgtaaagccctggtttataaggttctttccaccggaagctatgacagaggaaacgtgtgggtggggaggggtagtgggtgagggacccaggttcctgacacagacagactacacccagggaatgaagagcaagcgccatgttgaagccatcattaccattcacatccctcttattcctgcagctgcccctgctgggagtggggctgaacacgacaattctgacgcccaatgggaatgaagacaccacagctggtgggaaatctgggactggagggggctggtgagaagggtggctgtgggaaggggccgtacagagatctggtgcctgccactggccattacaatcatgtgggcagaattgaaaagtggagtgggaagggcaagggggagggttccctgcctcacgctacttcttctttctttctttcttgtttgtttgtttctttctttcttttgaggcagggtctcactatgttgcctaggctggtctcaaactcctggcctctagtgatcctcctgcctcagcctttcaaagcaccaggattacagacatgagccaccgtgcttggcctcctccttctgaccatcatttctctttccctccctgccttcattttctccccaatctagatttcttcctgaccactatgcccactgactccctcagtgtttccactctgcccctcccagaggttcagtgttttgtgttcaatgtcgagtacatgaattgcacttggaacagcagctctgagccccagcctaccaacctcactctgcattattggtatgagaagggacgagggggaggggatgaagaagaggtgggttggatcagagaccaagagagagggtagcaagtctcccaggtaccccactgttttctcctggggtaagtcataagtcggttgaggggagatgaggctaggctctggatatctgcagtacccagattggccccactgttcctcttccttccaacctttctcctctaggtacaagaactcggataatgataaagtccagaagtgcagccactatctattctctgaagaaatcacttctggctgtcagttgcaaaaaaaggagatccacctctaccaaacatttgttgttcagctccaggacccacgggaacccaggagacaggccacacagatgctaaaactgcagaatctgggtaatttggaaagaaagggtcaagagaccagggatactgtgggacattggagtctacagagtagtgttcttttatcataagggtacatgggcagaaaagaggaggtaggggatcatgatgggaagggaggaggtattaggggcactaccttcaggatcctgacttgtctaggccaggggaatgaccacatatgcacacatatctccagtgatcccctgggctccagagaacctaacacttcacaaactgagtgaatcccagctagaactgaactggaacaacagattcttgaaccactgtttggagcacttggtgcagtaccggactgactgggaccacagctggactgtgagtgactagggacgtgaatgtagcagctaaggccaagaaagtagggctaaaggattcaaccagacagatagaaggacctaatatcaagctcctgttctctgcctcccagcttctctgctcaccccctaccctccctcctccaactcctttcccccctattttctccagtgagttttctttttttcttttcttttctttctttctttcttttttttttttttttgagacagagcctcactctgttgcccaggcttgagtgcagtggggcgatcttgggctcactgcgacctctgtctccctggttcaagtgattctcctgcttcagcctcccaagtagctgggagcatgcacaaccatgcctggctaatttttgtatttttagtaaagacagggttttgccatgttggtcaggctggtcttgaactcctgacctcaggtgatctgcccacctcggcctcccaaagtgctgggattacaggcgtgagccaccattcctgacaccagtgagttttcattagggattccctacccatactcttcctgataccagatagacaagtaaacaaaaggaagccattaaggggatccagaggggaggcattagattcaagtcagtgaagggagcagtgtggcttgagtagtcaagagatgagagagaaactgggcagtagcagagatgacactggtgggtgttcaggagtatgttttaattctcccttctctcatagacacccactttccctcatcctctttctcctcaaggaacaatcagtggattatagacataagttctccttgcctagtgtggatgggcagaaacgctacacgtttcgtgttcggagccgctttaacccactctgtggaagtgctcagcattggagtgaatggagccacccaatccactgggggagcaatacttcaaaaggtaaaatgggcccacatgacccaatccatgagcccaacaccccagcctttctaacaccactgtcttttgctccacttccctgtcactaaagcccctaaacttggtgccccatctctccacactgtctaaccccaacctctagaaatcaaggtttttctgtgtagggttgggttagcgtgttgttagagtaggggagtggattgagaaggaggctgaggggtactcaagggggctatagaatgtataggatttccctgaagcattcctagagagcctgcaaggtgaagatggctttggaaccagctggatctaggctgtgccacatactacctctttggccttggccacatccctaaactcttggattctgtttcctaagatgtaagatggaggtaattgttcctgcctcacaggagctgttgtgaggattaaacagagagtatgtctttagcgcggtgcctggcaccagtgcctggcatgtagtaggggcacaacaaatataaggtccactttgcttttcttttttctatagagaatcctttcctgtttgcattggaagccgtggttatctctgttggctccatgggattgattatcagccttctctgtgtgtatttctggctggaacggtgagatttggagaagcccagaaaaatgaggggaacggtagctgacaatagcagaggagggttttgcagggtctttaggagtaaaggatgagacagtaagtaatgagagattacccaagagggtttggtgatggaaggaagccacaggcacagagaacacagaatcactttatttcatatgggacaactgggagaagggtgataaaaaagctttaacctatgtgctcctgctccctctttctcccctgtcaggacgatgccccgaattcccaccctgaagaacctagaggatcttgttactgaataccacgggaacttttcggtgagaacgctgtcataagcatgctgcagtctatcaactgccaactgcctgccagcaagacagacagagtgtgggggtgggggcagagaggagagggaaggaggccctgcactaactgtcaggatgtggccgaccaaatggggcatggactatacagagagagacacacacagaagtgcagattatagattgaatgaggcagatggcaactggtattgggggcccaggagcctgtgtatcccttctgtaatcaattacagtggttgcagacatcatgagtactcctttggcacagagctcggtcttttacttcctgcccctaattgacccctgacctggacatatctgtctttaggcctggagtggtgtgtctaagggactggctgagagtctgcagccagactacagtgaacgactctgcctcgtcagtgagattcccccaaaaggaggggcccttggggaggggcctggggcctccccatgcaaccagcatagcccctactgggcccccccatgttacaccctaaagcctgaaacctgaaccccaatcctctgacagaagaaccccagggtcctgtagccctaagtggtactaactttccttcattcaacccacctgcgtctcatactcacctcaccccactgtggctgatttggaattttgtgcccccatgtaagcaccccttcatttggcattccccacttgagaattacccttttgccccgaacatgtttttcttctccctcagtctggcccttccttttcgcaggattcttcctccctccctctttccctcccttcctctttccatctaccctccgattgttcctgaaccgatgagaaataaagtttctgttgataatcatcaaaaatgtctgtcatgggggtggggagcaggggaagcctgggatgcaatgagggtgggaggggaagaaaaaggagtagtacattcatgctgtggaggcatctaaaaaaataaaaaaaataaaaaaagcattattgactgatgcatgtaacctttttttttttttttttttttttggtaatgactccaacttattgatagtgttatagctg

SEQ ID NO: 1032 - DNA, 245 bp, unidentified
  source 1..245: mol_type = other DNA
acactatcaataagttggagtcattaccgtagtgtatttttttttttttttttatcatcggtaatgactccaacttattgatagtgtttttttttttttttttttttttggcgatcgcttttttttttttttttgctagaaagagtactgttctggaaactgacttttttttttttttttgcgatcgcctttttttttttttgatacatttacactatcaataagttggagtcattaccgatgat

SEQ ID NO: 1033 - DNA, 248 bp, unidentified
  source 1..248: mol_type = other DNA
cacgtgggtaatgactccaacttattgatagtgttttctcgatcattattattttttggcgatcgcttttttttttttttttgttgagaatggtgctagtggtagtgaacagttttttttttttttttgcgatcgcctttttttttttttttttttttacactatcaataagttggagtcattacccacgtgttttttttttttttttttttgacgaataggtaatgactccaacttattgatagtgt

SEQ ID NO: 1034 - DNA, 4713 bp, unidentified
  source 1..4713: mol_type = other DNA
tacactacggtaatgactccaacttattgatagtgtttttttttttttttttttttttggttacatgcatcagtcaataatgctttttttattttttttatttttttagatgcctccacagcatgaatgtactactcctttttcttcccctcccaccctcattgcatcccaggcttcccctgctccccacccccatgacagacatttttgatgattatcaacagaaactttatttctcatcggttcaggaacaatcggagggtagatggaaagaggaagggagggaaagagggagggaggaagaatcctgcgaaaaggaagggccagactgagggagaagaaaaacatgttcggggcaaaagggtaattctcaagtggggaatgccaaatgaaggggtgcttacatgggggcacaaaattccaaatcagccacagtggggtgaggtgagtatgagacgcaggtgggttgaatgaaggaaagttagtaccacttagggctacaggaccctggggttcttctgtcagaggattggggttcaggtttcaggctttagggtgtaacatgggggggcccagtaggggctatgctggttgcatggggaggccccaggcccctccccaagggcccctccttttgggggaatctcactgacgaggcagagtcgttcactgtagtctggctgcagactctcagccagtcccttagacacaccactccaggcctaaagacagatatgtccaggtcaggggtcaattaggggcaggaagtaaaagaccgagctctgtgccaaaggagtactcatgatgtctgcaaccactgtaattgattacagaagggatacacaggctcctgggcccccaataccagttgccatctgcctcattcaatctataatctgcacttctgtgtgtgtctctctctgtatagtccatgccccatttggtcggccacatcctgacagttagtgcagggcctccttccctctcctctctgcccccacccccacactctgtctgtcttgctggcaggcagttggcagttgatagactgcagcatgcttatgacagcgttctcaccgaaaagttcccgtggtattcagtaacaagatcctctaggttcttcagggtgggaattcggggcatcgtcctgacaggggagaaagagggagcaggagcacataggttaaagcttttttatcacccttctcccagttgtcccatatgaaataaagtgattctgtgttctctgtgcctgtggcttccttccatcaccaaaccctcttgggtaatctctcattacttactgtctcatcctttactcctaaagaccctgcaaaaccctcctctgctattgtcagctaccgttcccctcatttttctgggcttctccaaatctcaccgttccagccagaaatacacacagagaaggctgataatcaatcccatggagccaacagagataaccacggcttccaatgcaaacaggaaaggattctctatagaaaaaagaaaagcaaagtggaccttatatttgttgtgcccctactacatgccaggcactggtgccaggcaccgcgctaaagacatactctctgtttaatcctcacaacagctcctgtgaggcaggaacaattacctccatcttacatcttaggaaacagaatccaagagtttagggatgtggccaaggccaaagaggtagtatgtggcacagcctagatccagctggttccaaagccatcttcaccttgcaggctctctaggaatgcttcagggaaatcctatacattctatagcccccttgagtacccctcagcctccttctcaatccactcccctactctaacaacacgctaacccaaccctacacagaaaaaccttgatttctagaggttggggttagacagtgtggagagatggggcaccaagtttaggggctttagtgacagggaagtggagcaaaagacagtggtgttagaaaggctggggtgttgggctcatggattgggtcatgtgggcccattttaccttttgaagtattgctcccccagtggattgggtggctccattcactccaatgctgagcacttccacagagtgggttaaagcggctccgaacacgaaacgtgtagcgtttctgcccatccacactaggcaaggagaacttatgtctataatccactgattgttccttgaggagaaagaggatgagggaaagtgggtgtctatgagagaagggagaattaaaacatactcctgaacacccaccagtgtcatctctgctactgcccagtttctctctcatctcttgactactcaagccacactgctcccttcactgacttgaatctaatgcctcccctctggatccccttaatggcttccttttgtttacttgtctatctggtatcaggaagagtatgggtagggaatccctaatgaaaactcactggtgtcaggaatggtggctcacgcctgtaatcccagcactttgggaggccgaggtgggcagatcacctgaggtcaggagttcaagaccagcctgaccaacatggcaaaaccctgtctttactaaaaatacaaaaattagccaggcatggttgtgcatgctcccagctacttgggaggctgaagcaggagaatcacttgaaccagggagacagaggtcgcagtgagcccaagatcgccccactgcactcaagcctgggcaacagagtgaggctctgtctcaaaaaaaaaaaaaaaagaaagaaagaaagaaaagaaaagaaaaaaagaaaactcactggagaaaataggggggaaaggagttggaggagggagggtagggggtgagcagagaagctgggaggcagagaacaggagcttgatattaggtccttctatctgtctggttgaatcctttagccctactttcttggccttagctgctacattcacgtccctagtcactcacagtccagctgtggtcccagtcagtccggtactgcaccaagtgctccaaacagtggttcaagaatctgttgttccagttcagttctagctgggattcactcagtttgtgaagtgttaggttctctggagcccaggggatcactggagatatgtgtgcatatgtggtcattcccctggcctagacaagtcaggatcctgaaggtagtgcccctaatacctcctcccttcccatcatgatcccctacctcctcttttctgcccatgtacccttatgataaaagaacactactctgtagactccaatgtcccacagtatccctggtctcttgaccctttctttccaaattacccagattctgcagttttagcatctgtgtggcctgtctcctgggttcccgtgggtcctggagctgaacaacaaatgtttggtagaggtggatctcctttttttgcaactgacagccagaagtgatttcttcagagaatagatagtggctgcacttctggactttatcattatccgagttcttgtacctagaggagaaaggttggaaggaagaggaacagtggggccaatctgggtactgcagatatccagagcctagcctcatctcccctcaaccgacttatgacttaccccaggagaaaacagtggggtacctgggagacttgctaccctctctcttggtctctgatccaacccacctcttcttcatcccctccccctcgtcccttctcataccaataatgcagagtgaggttggtaggctggggctcagagctgctgttccaagtgcaattcatgtactcgacattgaacacaaaacactgaacctctgggaggggcagagtggaaacactgagggagtcagtgggcatagtggtcaggaagaaatctagattggggagaaaatgaaggcagggagggaaagagaaatgatggtcagaaggaggaggccaagcacggtggctcatgtctgtaatcctggtgctttgaaaggctgaggcaggaggatcactagaggccaggagtttgagaccagcctaggcaacatagtgagaccctgcctcaaaagaaagaaagaaacaaacaaacaagaaagaaagaaagaagaagtagcgtgaggcagggaaccctcccccttgcccttcccactccacttttcaattctgcccacatgattgtaatggccagtggcaggcaccagatctctgtacggccccttcccacagccacccttctcaccagccccctccagtcccagatttcccaccagctgtggtgtcttcattcccattgggcgtcagaattgtcgtgttcagccccactcccagcaggggcagctgcaggaataagagggatgtgaatggtaatgatggcttcaacatggcgcttgctcttcattccctgggtgtagtctgtctgtgtcaggaacctgggtccctcacccactacccctccccacccacacgtttcctctgtcatagcttccggtggaaagaaccttataaaccagggctttacagagggtgtggcaaatatgtgctgtgtgacacgggctaagtcctctaggagattaggtgctgctgtaaggtggtaaacagaaactaaagctggatatacaatagtgtcacagactcaaaaatcctcagcccacctagatcctgggaaggatctgttcactgcggccgcatgttctttttttttttttttttttttttacactatcaataagttggagtcattacctattcgtc

SEQ ID NO: 1035 - DNA, 248 bp, unidentified
  source 1..248: mol_type = other DNA
cacgtgggtaatgactccaacttattgatagtgttttctcgatcattattattttttggcgatcgcttttttttttttttttagcaaattggtaatactcctgcctccacagttttttttttttttttgcgatcgcctttttttttttttttttttttacactatcaataagttggagtcattacccacgtgttttttttttttttttttttcagctataggtaatgactccaacttattgatagtgt

SEQ ID NO: 1036 - DNA, 245 bp, unidentified
  source 1..245: mol_type = other DNA
acactatcaataagttggagtcattaccagtatgaatttttttttttttttttatcatcggtaatgactccaacttattgatagtgtttttttttttttttttttttttggcgatcgcttttttttttttttttccttctcctctaaatcattaccttctataattttttttttttttttgcgatcgcctttttttttttttgatacatttacactatcaataagttggagtcattaccgatgat

SEQ ID NO: 1037 - DNA, 4712 bp, unidentified
  source 1..4712: mol_type = other DNA
ttcatactggtaatgactccaacttattgatagtgtttttttttttttttttttttttgaacatgcggccgcgtgaacagatccttcccaggatctaggtgggctgaggatttttgagtctgtgacactattgtatatccagctttagtttctgtttaccaccttacagcagcacctaatctcctagaggacttagcccgtgtcacacagcacatatttgccacaccctctgtaaagccctggtttataaggttctttccaccggaagctatgacagaggaaacgtgtgggtggggaggggtagtgggtgagggacccaggttcctgacacagacagactacacccagggaatgaagagcaagcgccatgttgaagccatcattaccattcacatccctcttattcctgcagctgcccctgctgggagtggggctgaacacgacaattctgacgcccaatgggaatgaagacaccacagctggtgggaaatctgggactggagggggctggtgagaagggtggctgtgggaaggggccgtacagagatctggtgcctgccactggccattacaatcatgtgggcagaattgaaaagtggagtgggaagggcaagggggagggttccctgcctcacgctacttcttctttctttctttcttgtttgtttgtttctttctttcttttgaggcagggtctcactatgttgcctaggctggtctcaaactcctggcctctagtgatcctcctgcctcagcctttcaaagcaccaggattacagacatgagccaccgtgcttggcctcctccttctgaccatcatttctctttccctccctgccttcattttctccccaatctagatttcttcctgaccactatgcccactgactccctcagtgtttccactctgcccctcccagaggttcagtgttttgtgttcaatgtcgagtacatgaattgcacttggaacagcagctctgagccccagcctaccaacctcactctgcattattggtatgagaagggacgagggggaggggatgaagaagaggtgggttggatcagagaccaagagagagggtagcaagtctcccaggtaccccactgttttctcctggggtaagtcataagtcggttgaggggagatgaggctaggctctggatatctgcagtacccagattggccccactgttcctcttccttccaacctttctcctctaggtacaagaactcggataatgataaagtccagaagtgcagccactatctattctctgaagaaatcacttctggctgtcagttgcaaaaaaaggagatccacctctaccaaacatttgttgttcagctccaggacccacgggaacccaggagacaggccacacagatgctaaaactgcagaatctgggtaatttggaaagaaagggtcaagagaccagggatactgtgggacattggagtctacagagtagtgttcttttatcataagggtacatgggcagaaaagaggaggtaggggatcatgatgggaagggaggaggtattaggggcactaccttcaggatcctgacttgtctaggccaggggaatgaccacatatgcacacatatctccagtgatcccctgggctccagagaacctaacacttcacaaactgagtgaatcccagctagaactgaactggaacaacagattcttgaaccactgtttggagcacttggtgcagtaccggactgactgggaccacagctggactgtgagtgactagggacgtgaatgtagcagctaaggccaagaaagtagggctaaaggattcaaccagacagatagaaggacctaatatcaagctcctgttctctgcctcccagcttctctgctcaccccctaccctccctcctccaactcctttcccccctattttctccagtgagttttctttttttcttttcttttctttctttctttcttttttttttttttttgagacagagcctcactctgttgcccaggcttgagtgcagtggggcgatcttgggctcactgcgacctctgtctccctggttcaagtgattctcctgcttcagcctcccaagtagctgggagcatgcacaaccatgcctggctaatttttgtatttttagtaaagacagggttttgccatgttggtcaggctggtcttgaactcctgacctcaggtgatctgcccacctcggcctcccaaagtgctgggattacaggcgtgagccaccattcctgacaccagtgagttttcattagggattccctacccatactcttcctgataccagatagacaagtaaacaaaaggaagccattaaggggatccagaggggaggcattagattcaagtcagtgaagggagcagtgtggcttgagtagtcaagagatgagagagaaactgggcagtagcagagatgacactggtgggtgttcaggagtatgttttaattctcccttctctcatagacacccactttccctcatcctctttctcctcaaggaacaatcagtggattatagacataagttctccttgcctagtgtggatgggcagaaacgctacacgtttcgtgttcggagccgctttaacccactctgtggaagtgctcagcattggagtgaatggagccacccaatccactgggggagcaatacttcaaaaggtaaaatgggcccacatgacccaatccatgagcccaacaccccagcctttctaacaccactgtcttttgctccacttccctgtcactaaagcccctaaacttggtgccccatctctccacactgtctaaccccaacctctagaaatcaaggtttttctgtgtagggttgggttagcgtgttgttagagtaggggagtggattgagaaggaggctgaggggtactcaagggggctatagaatgtataggatttccctgaagcattcctagagagcctgcaaggtgaagatggctttggaaccagctggatctaggctgtgccacatactacctctttggccttggccacatccctaaactcttggattctgtttcctaagatgtaagatggaggtaattgttcctgcctcacaggagctgttgtgaggattaaacagagagtatgtctttagcgcggtgcctggcaccagtgcctggcatgtagtaggggcacaacaaatataaggtccactttgcttttcttttttctatagagaatcctttcctgtttgcattggaagccgtggttatctctgttggctccatgggattgattatcagccttctctgtgtgtatttctggctggaacggtgagatttggagaagcccagaaaaatgaggggaacggtagctgacaatagcagaggagggttttgcagggtctttaggagtaaaggatgagacagtaagtaatgagagattacccaagagggtttggtgatggaaggaagccacaggcacagagaacacagaatcactttatttcatatgggacaactgggagaagggtgataaaaaagctttaacctatgtgctcctgctccctctttctcccctgtcaggacgatgccccgaattcccaccctgaagaacctagaggatcttgttactgaataccacgggaacttttcggtgagaacgctgtcataagcatgctgcagtctatcaactgccaactgcctgccagcaagacagacagagtgtgggggtgggggcagagaggagagggaaggaggccctgcactaactgtcaggatgtggccgaccaaatggggcatggactatacagagagagacacacacagaagtgcagattatagattgaatgaggcagatggcaactggtattgggggcccaggagcctgtgtatcccttctgtaatcaattacagtggttgcagacatcatgagtactcctttggcacagagctcggtcttttacttcctgcccctaattgacccctgacctggacatatctgtctttaggcctggagtggtgtgtctaagggactggctgagagtctgcagccagactacagtgaacgactctgcctcgtcagtgagattcccccaaaaggaggggcccttggggaggggcctggggcctccccatgcaaccagcatagcccctactgggcccccccatgttacaccctaaagcctgaaacctgaaccccaatcctctgacagaagaaccccagggtcctgtagccctaagtggtactaactttccttcattcaacccacctgcgtctcatactcacctcaccccactgtggctgatttggaattttgtgcccccatgtaagcaccccttcatttggcattccccacttgagaattacccttttgccccgaacatgtttttcttctccctcagtctggcccttccttttcgcaggattcttcctccctccctctttccctcccttcctctttccatctaccctccgattgttcctgaaccgatgagaaataaagtttctgttgataatcatcaaaaatgtctgtcatgggggtggggagcaggggaagcctgggatgcaatgagggtgggaggggaagaaaaaggagtagtacattcatgctgtggaggcatctaaaaaaataaaaaaaataaaaaaagcattattgactgatgcatgtaacctttttttttttttttttttttttacactatcaataagttggagtcattacctatagctg

SEQ ID NO: 1038 - DNA, 239 bp, unidentified
  source 1..239: mol_type = other DNA
ggtaatgactccaacttattgatagtgtgtagtgtatttttttttttttttttatcatcacactatcaataagttggagtcattaccttttttttttttttttttttttgcgaccttttttttttttttttgctagaaagagtactgttctggaaactgacttttttttttttttttggtcgctttttttttttttgatacatttggtaatgactccaacttattgatagtgtgatgat

SEQ ID NO: 1039 - DNA, 241 bp, unidentified
  source 1..241: mol_type = other DNA
cacgtgacactatcaataagttggagtcattacctttctcgatcattattattttttgcgaccttttttttttttttttgttgagaatggtgctagtggtagtgaacagtttttttttttttttggtcgctttttttttttttttttttttggtaatgactccaacttattgatagtgtcacgtgttttttttttttttttttttgacgaataacactatcaataagttggagtcattacc

SEQ ID NO: 1040 - DNA, 4713 bp, unidentified; identical to SEQ ID NO: 1028
  source 1..4713: mol_type = other DNA

SEQ ID NO: 1041 - DNA, 242 bp, unidentified
  source 1..242: mol_type = other DNA
cacgtgacactatcaataagttggagtcattacctttctcgatcattattattttttgcgaccttttttttttttttttagcaaattggtaatactcctgcctccacagttttttttttttttttggtcgctttttttttttttttttttttggtaatgactccaacttattgatagtgtcacgtgttttttttttttttttttttcagctataacactatcaataagttggagtcattacc

SEQ ID NO: 1042 - DNA, 239 bp, unidentified
  source 1..239: mol_type = other DNA
ggtaatgactccaacttattgatagtgtagtatgaatttttttttttttttttatcatcacactatcaataagttggagtcattaccttttttttttttttttttttttgcgaccttttttttttttttttccttctcctctaaatcattaccttctataattttttttttttttttggtcgctttttttttttttgatacatttggtaatgactccaacttattgatagtgtgatgat

SEQ ID NO: 1043 - DNA, 4712 bp, unidentified; identical to SEQ ID NO: 1031
  source 1..4712: mol_type = other DNA

SEQ ID NO: 1044 - DNA, 239 bp, unidentified
  source 1..239: mol_type = other DNA
acactatcaataagttggagtcattaccgtagtgtatttttttttttttttttatcatcggtaatgactccaacttattgatagtgtttttttttttttttttttttttgcgaccttttttttttttttttgctagaaagagtactgttctggaaactgacttttttttttttttttggtcgctttttttttttttgatacatttacactatcaataagttggagtcattaccgatgat

SEQ ID NO: 1045 - DNA, 242 bp, unidentified
  source 1..242: mol_type = other DNA
cacgtgggtaatgactccaacttattgatagtgttttctcgatcattattattttttgcgaccttttttttttttttttgttgagaatggtgctagtggtagtgaacagttttttttttttttttggtcgctttttttttttttttttttttacactatcaataagttggagtcattacccacgtgttttttttttttttttttttgacgaataggtaatgactccaacttattgatagtgt

SEQ ID NO: 1046 - DNA, 4713 bp, unidentified; identical to SEQ ID NO: 1034
  source 1..4713: mol_type = other DNA

SEQ ID NO: 1047 - DNA, 242 bp, unidentified
  source 1..242: mol_type = other DNA
cacgtgggtaatgactccaacttattgatagtgttttctcgatcattattattttttgcgaccttttttttttttttttagcaaattggtaatactcctgcctccacagttttttttttttttttggtcgctttttttttttttttttttttacactatcaataagttggagtcattacccacgtgttttttttttttttttttttcagctataggtaatgactccaacttattgatagtgt

SEQ ID NO: 1048 - DNA, 239 bp, unidentified
  source 1..239: mol_type = other DNA
acactatcaataagttggagtcattaccagtatgaatttttttttttttttttatcatcggtaatgactccaacttattgatagtgtttttttttttttttttttttttgcgaccttttttttttttttttccttctcctctaaatcattaccttctataattttttttttttttttggtcgctttttttttttttgatacatttacactatcaataagttggagtcattaccgatgat

SEQ ID NO: 1049 - DNA, 4712 bp, unidentified; identical to SEQ ID NO: 1037
  source 1..4712: mol_type = other DNA

SEQ ID NO: 1050 - DNA, 251 bp, unidentified
  source 1..251: mol_type = other DNA
ggtaatgactccaacttattgatagtgtgtagtgtatttttttttttttttttatcatcacactatcaataagttggagtcattaccttttttttttttttttttttttgcggcgatcggcttttttttttttttttgctagaaagagtactgttctggaaactgacttttttttttttttttgccgatcgccgctttttttttttttgatacatttggtaatgactccaacttattgatagtgtgatgat

SEQ ID NO: 1051 - DNA, 254 bp, unidentified
  source 1..254: mol_type = other DNA
cacgtgacactatcaataagttggagtcattacctttctcgatcattattattttttgcggcgatcggcttttttttttttttttgttgagaatggtgctagtggtagtgaacagttttttttttttttttgccgatcgccgctttttttttttttttttttttggtaatgactccaacttattgatagtgtcacgtgttttttttttttttttttttgacgaataacactatcaataagttggagtcattacc

SEQ ID NO: 1052 - DNA, 4713 bp, unidentified; identical to SEQ ID NO: 1028
  source 1..4713: mol_type = other DNA

SEQ ID NO: 1053 - DNA, 254 bp, unidentified
  source 1..254: mol_type = other DNA
cacgtgacactatcaataagttggagtcattacctttctcgatcattattattttttgcggcgatcggcttttttttttttttttagcaaattggtaatactcctgcctccacagttttttttttttttttgccgatcgccgctttttttttttttttttttttggtaatgactccaacttattgatagtgtcacgtgttttttttttttttttttttcagctataacactatcaataagttggagtcattacc

SEQ ID NO: 1054 - DNA, 251 bp, unidentified
  source 1..251: mol_type = other DNA
ggtaatgactccaacttattgatagtgtagtatgaatttttttttttttttttatcatcacactatcaataagttggagtcattaccttttttttttttttttttttttgcggcgatcggcttttttttttttttttccttctcctctaaatcattaccttctataattttttttttttttttgccgatcgccgctttttttttttttgatacatttggtaatgactccaacttattgatagtgtgatgat

SEQ ID NO: 1055 - DNA, 4712 bp, unidentified; identical to SEQ ID NO: 1031
  source 1..4712: mol_type = other DNA

SEQ ID NO: 1056 - DNA, 251 bp, unidentified
  source 1..251: mol_type = other DNA
acactatcaataagttggagtcattaccgtagtgtatttttttttttttttttatcatcggtaatgactccaacttattgatagtgtttttttttttttttttttttttgcggcgatcggcttttttttttttttttgctagaaagagtactgttctggaaactgacttttttttttttttttgccgatcgccgctttttttttttttgatacatttacactatcaataagttggagtcattaccgatgat

SEQ ID NO: 1057 - DNA, 254 bp, unidentified
  source 1..254: mol_type = other DNA
cacgtgggtaatgactccaacttattgatagtgttttctcgatcattattattttttgcggcgatcggcttttttttttttttttgttgagaatggtgctagtggtagtgaacagttttttttttttttttgccgatcgccgctttttttttttttttttttttacactatcaataagttggagtcattacccacgtgttttttttttttttttttttgacgaataggtaatgactccaacttattgatagtgt

SEQ ID NO: 1058 - DNA, 4713 bp, unidentified; identical to SEQ ID NO: 1034
  source 1..4713: mol_type = other DNA

SEQ ID NO: 1059 - DNA, 254 bp, unidentified
  source 1..254: mol_type = other DNA
cacgtgggtaatgactccaacttattgatagtgttttctcgatcattattattttttgcggcgatcggcttttttttttttttttagcaaattggtaatactcctgcctccacagttttttttttttttttgccgatcgccgctttttttttttttttttttttacactatcaataagttggagtcattacccacgtgttttttttttttttttttttcagctataggtaatgactccaacttattgatagtgt

SEQ ID NO: 1060 - DNA, 251 bp, unidentified
  source 1..251: mol_type = other DNA
acactatcaataagttggagtcattaccagtatgaatttttttttttttttttatcatcggtaatgactccaacttattgatagtgtttttttttttttttttttttttgcggcgatcggcttttttttttttttttccttctcctctaaatcattaccttctataattttttttttttttttgccgatcgccgctttttttttttttgatacatttacactatcaataagttggagtcattaccgatgat

SEQ ID NO: 1061 - DNA, 4712 bp, unidentified; identical to SEQ ID NO: 1037
  source 1..4712: mol_type = other DNA

SEQ ID NO: 1062 - DNA, 245 bp, unidentified
  source 1..245: mol_type = other DNA
ggtgatgcctctaattagttgaatctgagtagtgtatttttttttttttttttatcatctcagattcaactaattagaggcatcaccttttttttttttttttttttttggcgatcgcttttttttttttttttgctagaaagagtactgttctggaaactgacttttttttttttttttgcgatcgcctttttttttttttgatacatttggtgatgcctctaattagttgaatctgagatgat

SEQ ID NO: 1063 - DNA, 248 bp, unidentified
  source 1..248: mol_type = other DNA
cacgtgtcagattcaactaattagaggcatcacctttctcgatcattattattttttggcgatcgcttttttttttttttttgttgagaatggtgctagtggtagtgaacagttttttttttttttttgcgatcgcctttttttttttttttttttttggtgatgcctctaattagttgaatctgacacgtgttttttttttttttttttttgacgaatatcagattcaactaattagaggcatcacc

SEQ ID NO: 1064 - DNA, 4713 bp, unidentified
  source 1..4713: mol_type = other DNA
tacactactcagattcaactaattagaggcatcaccttttttttttttttttttttttggttacatgcatcagtcaataatgctttttttattttttttatttttttagatgcctccacagcatgaatgtactactcctttttcttcccctcccaccctcattgcatcccaggcttcccctgctccccacccccatgacagacatttttgatgattatcaacagaaactttatttctcatcggttcaggaacaatcggagggtagatggaaagaggaagggagggaaagagggagggaggaagaatcctgcgaaaaggaagggccagactgagggagaagaaaaacatgttcggggcaaaagggtaattctcaagtggggaatgccaaatgaaggggtgcttacatgggggcacaaaattccaaatcagccacagtggggtgaggtgagtatgagacgcaggtgggttgaatgaaggaaagttagtaccacttagggctacaggaccctggggttcttctgtcagaggattggggttcaggtttcaggctttagggtgtaacatgggggggcccagtaggggctatgctggttgcatggggaggccccaggcccctccccaagggcccctccttttgggggaatctcactgacgaggcagagtcgttcactgtagtctggctgcagactctcagccagtcccttagacacaccactccaggcctaaagacagatatgtccaggtcaggggtcaattaggggcaggaagtaaaagaccgagctctgtgccaaaggagtactcatgatgtctgcaaccactgtaattgattacagaagggatacacaggctcctgggcccccaataccagttgccatctgcctcattcaatctataatctgcacttctgtgtgtgtctctctctgtatagtccatgccccatttggtcggccacatcctgacagttagtgcagggcctccttccctctcctctctgcccccacccccacactctgtctgtcttgctggcaggcagttggcagttgatagactgcagcatgcttatgacagcgttctcaccgaaaagttcccgtggtattcagtaacaagatcctctaggttcttcagggtgggaattcggggcatcgtcctgacaggggagaaagagggagcaggagcacataggttaaagcttttttatcacccttctcccagttgtcccatatgaaataaagtgattctgtgttctctgtgcctgtggcttccttccatcaccaaaccctcttgggtaatctctcattacttactgtctcatcctttactcctaaagaccctgcaaaaccctcctctgctattgtcagctaccgttcccctcatttttctgggcttctccaaatctcaccgttccagccagaaatacacacagagaaggctgataatcaatcccatggagccaacagagataaccacggcttccaatgcaaacaggaaaggattctctatagaaaaaagaaaagcaaagtggaccttatatttgttgtgcccctactacatgccaggcactggtgccaggcaccgcgctaaagacatactctctgtttaatcctcacaacagctcctgtgaggcaggaacaattacctccatcttacatcttaggaaacagaatccaagagtttagggatgtggccaaggccaaagaggtagtatgtggcacagcctagatccagctggttccaaagccatcttcaccttgcaggctctctaggaatgcttcagggaaatcctatacattctatagcccccttgagtacccctcagcctccttctcaatccactcccctactctaacaacacgctaacccaaccctacacagaaaaaccttgatttctagaggttggggttagacagtgtggagagatggggcaccaagtttaggggctttagtgacagggaagtggagcaaaagacagtggtgttagaaaggctggggtgttgggctcatggattgggtcatgtgggcccattttaccttttgaagtattgctcccccagtggattgggtggctccattcactccaatgctgagcacttccacagagtgggttaaagcggctccgaacacgaaacgtgtagcgtttctgcccatccacactaggcaaggagaacttatgtctataatccactgattgttccttgaggagaaagaggatgagggaaagtgggtgtctatgagagaagggagaattaaaacatactcctgaacacccaccagtgtcatctctgctactgcccagtttctctctcatctcttgactactcaagccacactgctcccttcactgacttgaatctaatgcctcccctctggatccccttaatggcttccttttgtttacttgtctatctggtatcaggaagagtatgggtagggaatccctaatgaaaactcactggtgtcaggaatggtggctcacgcctgtaatcccagcactttgggaggccgaggtgggcagatcacctgaggtcaggagttcaagaccagcctgaccaacatggcaaaaccctgtctttactaaaaatacaaaaattagccaggcatggttgtgcatgctcccagctacttgggaggctgaagcaggagaatcacttgaaccagggagacagaggtcgcagtgagcccaagatcgccccactgcactcaagcctgggcaacagagtgaggctctgtctcaaaaaaaaaaaaaaaagaaagaaagaaagaaaagaaaagaaaaaaagaaaactcactggagaaaataggggggaaaggagttggaggagggagggtagggggtgagcagagaagctgggaggcagagaacaggagcttgatattaggtccttctatctgtctggttgaatcctttagccctactttcttggccttagctgctacattcacgtccctagtcactcacagtccagctgtggtcccagtcagtccggtactgcaccaagtgctccaaacagtggttcaagaatctgttgttccagttcagttctagctgggattcactcagtttgtgaagtgttaggttctctggagcccaggggatcactggagatatgtgtgcatatgtggtcattcccctggcctagacaagtcaggatcctgaaggtagtgcccctaatacctcctcccttcccatcatgatcccctacctcctcttttctgcccatgtacccttatgataaaagaacactactctgtagactccaatgtcccacagtatccctggtctcttgaccctttctttccaaattacccagattctgcagttttagcatctgtgtggcctgtctcctgggttcccgtgggtcctggagctgaacaacaaatgtttggtagaggtggatctcctttttttgcaactgacagccagaagtgatttcttcagagaatagatagtggctgcacttctggactttatcattatccgagttcttgtacctagaggagaaaggttggaaggaagaggaacagtggggccaatctgggtactgcagatatccagagcctagcctcatctcccctcaaccgacttatgacttaccccaggagaaaacagtggggtacctgggagacttgctaccctctctcttggtctctgatccaacccacctcttcttcatcccctccccctcgtcccttctcataccaataatgcagagtgaggttggtaggctggggctcagagctgctgttccaagtgcaattcatgtactcgacattgaacacaaaacactgaacctctgggaggggcagagtggaaacactgagggagtcagtgggcatagtggtcaggaagaaatctagattggggagaaaatgaaggcagggagggaaagagaaatgatggtcagaaggaggaggccaagcacggtggctcatgtctgtaatcctggtgctttgaaaggctgaggcaggaggatcactagaggccaggagtttgagaccagcctaggcaacatagtgagaccctgcctcaaaagaaagaaagaaacaaacaaacaagaaagaaagaaagaagaagtagcgtgaggcagggaaccctcccccttgcccttcccactccacttttcaattctgcccacatgattgtaatggccagtggcaggcaccagatctctgtacggccccttcccacagccacccttctcaccagccccctccagtcccagatttcccaccagctgtggtgtcttcattcccattgggcgtcagaattgtcgtgttcagccccactcccagcaggggcagctgcaggaataagagggatgtgaatggtaatgatggcttcaacatggcgcttgctcttcattccctgggtgtagtctgtctgtgtcaggaacctgggtccctcacccactacccctccccacccacacgtttcctctgtcatagcttccggtggaaagaaccttataaaccagggctttacagagggtgtggcaaatatgtgctgtgtgacacgggctaagtcctctaggagattaggtgctgctgtaaggtggtaaacagaaactaaagctggatatacaatagtgtcacagactcaaaaatcctcagcccacctagatcctgggaaggatctgttcactgcggccgcatgttctttttttttttttttttttttttggtgatgcctctaattagttgaatctgatattcgtc

SEQ ID NO: 1065 - DNA, 248 bp, unidentified
  source 1..248: mol_type = other DNA
cacgtgtcagattcaactaattagaggcatcacctttctcgatcattattattttttggcgatcgcttttttttttttttttagcaaattggtaatactcctgcctccacagttttttttttttttttgcgatcgcctttttttttttttttttttttggtgatgcctctaattagttgaatctgacacgtgttttttttttttttttttttcagctatatcagattcaactaattagaggcatcacc

SEQ ID NO: 1066 - DNA, 245 bp, unidentified
  source 1..245: mol_type = other DNA
ggtgatgcctctaattagttgaatctgaagtatgaatttttttttttttttttatcatctcagattcaactaattagaggcatcaccttttttttttttttttttttttggcgatcgcttttttttttttttttccttctcctctaaatcattaccttctataattttttttttttttttgcgatcgcctttttttttttttgatacatttggtgatgcctctaattagttgaatctgagatgat

SEQ ID NO: 1067 - DNA, 4712 bp, unidentified
  source 1..4712: mol_type = other DNA
ttcatacttcagattcaactaattagaggcatcaccttttttttttttttttttttttgaacatgcggccgcgtgaacagatccttcccaggatctaggtgggctgaggatttttgagtctgtgacactattgtatatccagctttagtttctgtttaccaccttacagcagcacctaatctcctagaggacttagcccgtgtcacacagcacatatttgccacaccctctgtaaagccctggtttataaggttctttccaccggaagctatgacagaggaaacgtgtgggtggggaggggtagtgggtgagggacccaggttcctgacacagacagactacacccagggaatgaagagcaagcgccatgttgaagccatcattaccattcacatccctcttattcctgcagctgcccctgctgggagtggggctgaacacgacaattctgacgcccaatgggaatgaagacaccacagctggtgggaaatctgggactggagggggctggtgagaagggtggctgtgggaaggggccgtacagagatctggtgcctgccactggccattacaatcatgtgggcagaattgaaaagtggagtgggaagggcaagggggagggttccctgcctcacgctacttcttctttctttctttcttgtttgtttgtttctttctttcttttgaggcagggtctcactatgttgcctaggctggtctcaaactcctggcctctagtgatcctcctgcctcagcctttcaaagcaccaggattacagacatgagccaccgtgcttggcctcctccttctgaccatcatttctctttccctccctgccttcattttctccccaatctagatttcttcctgaccactatgcccactgactccctcagtgtttccactctgcccctcccagaggttcagtgttttgtgttcaatgtcgagtacatgaattgcacttggaacagcagctctgagccccagcctaccaacctcactctgcattattggtatgagaagggacgagggggaggggatgaagaagaggtgggttggatcagagaccaagagagagggtagcaagtctcccaggtaccccactgttttctcctggggtaagtcataagtcggttgaggggagatgaggctaggctctggatatctgcagtacccagattggccccactgttcctcttccttccaacctttctcctctaggtacaagaactcggataatgataaagtccagaagtgcagccactatctattctctgaagaaatcacttctggctgtcagttgcaaaaaaaggagatccacctctaccaaacatttgttgttcagctccaggacccacgggaacccaggagacaggccacacagatgctaaaactgcagaatctgggtaatttggaaagaaagggtcaagagaccagggatactgtgggacattggagtctacagagtagtgttcttttatcataagggtacatgggcagaaaagaggaggtaggggatcatgatgggaagggaggaggtattaggggcactaccttcaggatcctgacttgtctaggccaggggaatgaccacatatgcacacatatctccagtgatcccctgggctccagagaacctaacacttcacaaactgagtgaatcccagctagaactgaactggaacaacagattcttgaaccactgtttggagcacttggtgcagtaccggactgactgggaccacagctggactgtgagtgactagggacgtgaatgtagcagctaaggccaagaaagtagggctaaaggattcaaccagacagatagaaggacctaatatcaagctcctgttctctgcctcccagcttctctgctcaccccctaccctccctcctccaactcctttcccccctattttctccagtgagttttctttttttcttttcttttctttctttctttcttttttttttttttttgagacagagcctcactctgttgcccaggcttgagtgcagtggggcgatcttgggctcactgcgacctctgtctccctggttcaagtgattctcctgcttcagcctcccaagtagctgggagcatgcacaaccatgcctggctaatttttgtatttttagtaaagacagggttttgccatgttggtcaggctggtcttgaactcctgacctcaggtgatctgcccacctcggcctcccaaagtgctgggattacaggcgtgagccaccattcctgacaccagtgagttttcattagggattccctacccatactcttcctgataccagatagacaagtaaacaaaaggaagccattaaggggatccagaggggaggcattagattcaagtcagtgaagggagcagtgtggcttgagtagtcaagagatgagagagaaactgggcagtagcagagatgacactggtgggtgttcaggagtatgttttaattctcccttctctcatagacacccactttccctcatcctctttctcctcaaggaacaatcagtggattatagacataagttctccttgcctagtgtggatgggcagaaacgctacacgtttcgtgttcggagccgctttaacccactctgtggaagtgctcagcattggagtgaatggagccacccaatccactgggggagcaatacttcaaaaggtaaaatgggcccacatgacccaatccatgagcccaacaccccagcctttctaacaccactgtcttttgctccacttccctgtcactaaagcccctaaacttggtgccccatctctccacactgtctaaccccaacctctagaaatcaaggtttttctgtgtagggttgggttagcgtgttgttagagtaggggagtggattgagaaggaggctgaggggtactcaagggggctatagaatgtataggatttccctgaagcattcctagagagcctgcaaggtgaagatggctttggaaccagctggatctaggctgtgccacatactacctctttggccttggccacatccctaaactcttggattctgtttcctaagatgtaagatggaggtaattgttcctgcctcacaggagctgttgtgaggattaaacagagagtatgtctttagcgcggtgcctggcaccagtgcctggcatgtagtaggggcacaacaaatataaggtccactttgcttttcttttttctatagagaatcctttcctgtttgcattggaagccgtggttatctctgttggctccatgggattgattatcagccttctctgtgtgtatttctggctggaacggtgagatttggagaagcccagaaaaatgaggggaacggtagctgacaatagcagaggagggttttgcagggtctttaggagtaaaggatgagacagtaagtaatgagagattacccaagagggtttggtgatggaaggaagccacaggcacagagaacacagaatcactttatttcatatgggacaactgggagaagggtgataaaaaagctttaacctatgtgctcctgctccctctttctcccctgtcaggacgatgccccgaattcccaccctgaagaacctagaggatcttgttactgaataccacgggaacttttcggtgagaacgctgtcataagcatgctgcagtctatcaactgccaactgcctgccagcaagacagacagagtgtgggggtgggggcagagaggagagggaaggaggccctgcactaactgtcaggatgtggccgaccaaatggggcatggactatacagagagagacacacacagaagtgcagattatagattgaatgaggcagatggcaactggtattgggggcccaggagcctgtgtatcccttctgtaatcaattacagtggttgcagacatcatgagtactcctttggcacagagctcggtcttttacttcctgcccctaattgacccctgacctggacatatctgtctttaggcctggagtggtgtgtctaagggactggctgagagtctgcagccagactacagtgaacgactctgcctcgtcagtgagattcccccaaaaggaggggcccttggggaggggcctggggcctccccatgcaaccagcatagcccctactgggcccccccatgttacaccctaaagcctgaaacctgaaccccaatcctctgacagaagaaccccagggtcctgtagccctaagtggtactaactttccttcattcaacccacctgcgtctcatactcacctcaccccactgtggctgatttggaattttgtgcccccatgtaagcaccccttcatttggcattccccacttgagaattacccttttgccccgaacatgtttttcttctccctcagtctggcccttccttttcgcaggattcttcctccctccctctttccctcccttcctctttccatctaccctccgattgttcctgaaccgatgagaaataaagtttctgttgataatcatcaaaaatgtctgtcatgggggtggggagcaggggaagcctgggatgcaatgagggtgggaggggaagaaaaaggagtagtacattcatgctgtggaggcatctaaaaaaataaaaaaaataaaaaaagcattattgactgatgcatgtaacctttttttttttttttttttttttggtgatgcctctaattagttgaatctgatatagctg

SEQ ID NO: 1068 - DNA, 245 bp, unidentified
  source 1..245: mol_type = other DNA
tcagattcaactaattagaggcatcaccgtagtgtatttttttttttttttttatcatcggtgatgcctctaattagttgaatctgattttttttttttttttttttttggcgatcgcttttttttttttttttgctagaaagagtactgttctggaaactgacttttttttttttttttgcgatcgcctttttttttttttgatacattttcagattcaactaattagaggcatcaccgatgat

SEQ ID NO: 1069 - DNA, 248 bp, unidentified
  source 1..248: mol_type = other DNA
cacgtgggtgatgcctctaattagttgaatctgatttctcgatcattattattttttggcgatcgcttttttttttttttttgttgagaatggtgctagtggtagtgaacagttttttttttttttttgcgatcgccttttttttttttttttttttttcagattcaactaattagaggcatcacccacgtgttttttttttttttttttttgacgaataggtgatgcctctaattagttgaatctga

SEQ ID NO: 1070 - DNA, 4713 bp, unidentified
  source 1..4713: mol_type = other DNA
tacactacggtgatgcctctaattagttgaatctgattttttttttttttttttttttggttacatgcatcagtcaataatgctttttttattttttttatttttttagatgcctccacagcatgaatgtactactcctttttcttcccctcccaccctcattgcatcccaggcttcccctgctccccacccccatgacagacatttttgatgattatcaacagaaactttatttctcatcggttcaggaacaatcggagggtagatggaaagaggaagggagggaaagagggagggaggaagaatcctgcgaaaaggaagggccagactgagggagaagaaaaacatgttcggggcaaaagggtaattctcaagtggggaatgccaaatgaaggggtgcttacatgggggcacaaaattccaaatcagccacagtggggtgaggtgagtatgagacgcaggtgggttgaatgaaggaaagttagtaccacttagggctacaggaccctggggttcttctgtcagaggattggggttcaggtttcaggctttagggtgtaacatgggggggcccagtaggggctatgctggttgcatggggaggccccaggcccctccccaagggcccctccttttgggggaatctcactgacgaggcagagtcgttcactgtagtctggctgcagactctcagccagtcccttagacacaccactccaggcctaaagacagatatgtccaggtcaggggtcaattaggggcaggaagtaaaagaccgagctctgtgccaaaggagtactcatgatgtctgcaaccactgtaattgattacagaagggatacacaggctcctgggcccccaataccagttgccatctgcctcattcaatctataatctgcacttctgtgtgtgtctctctctgtatagtccatgccccatttggtcggccacatcctgacagttagtgcagggcctccttccctctcctctctgcccccacccccacactctgtctgtcttgctggcaggcagttggcagttgatagactgcagcatgcttatgacagcgttctcaccgaaaagttcccgtggtattcagtaacaagatcctctaggttcttcagggtgggaattcggggcatcgtcctgacaggggagaaagagggagcaggagcacataggttaaagcttttttatcacccttctcccagttgtcccatatgaaataaagtgattctgtgttctctgtgcctgtggcttccttccatcaccaaaccctcttgggtaatctctcattacttactgtctcatcctttactcctaaagaccctgcaaaaccctcctctgctattgtcagctaccgttcccctcatttttctgggcttctccaaatctcaccgttccagccagaaatacacacagagaaggctgataatcaatcccatggagccaacagagataaccacggcttccaatgcaaacaggaaaggattctctatagaaaaaagaaaagcaaagtggaccttatatttgttgtgcccctactacatgccaggcactggtgccaggcaccgcgctaaagacatactctctgtttaatcctcacaacagctcctgtgaggcaggaacaattacctccatcttacatcttaggaaacagaatccaagagtttagggatgtggccaaggccaaagaggtagtatgtggcacagcctagatccagctggttccaaagccatcttcaccttgcaggctctctaggaatgcttcagggaaatcctatacattctatagcccccttgagtacccctcagcctccttctcaatccactcccctactctaacaacacgctaacccaaccctacacagaaaaaccttgatttctagaggttggggttagacagtgtggagagatggggcaccaagtttaggggctttagtgacagggaagtggagcaaaagacagtggtgttagaaaggctggggtgttgggctcatggattgggtcatgtgggcccattttaccttttgaagtattgctcccccagtggattgggtggctccattcactccaatgctgagcacttccacagagtgggttaaagcggctccgaacacgaaacgtgtagcgtttctgcccatccacactaggcaaggagaacttatgtctataatccactgattgttccttgaggagaaagaggatgagggaaagtgggtgtctatgagagaagggagaattaaaacatactcctgaacacccaccagtgtcatctctgctactgcccagtttctctctcatctcttgactactcaagccacactgctcccttcactgacttgaatctaatgcctcccctctggatccccttaatggcttccttttgtttacttgtctatctggtatcaggaagagtatgggtagggaatccctaatgaaaactcactggtgtcaggaatggtggctcacgcctgtaatcccagcactttgggaggccgaggtgggcagatcacctgaggtcaggagttcaagaccagcctgaccaacatggcaaaaccctgtctttactaaaaatacaaaaattagccaggcatggttgtgcatgctcccagctacttgggaggctgaagcaggagaatcacttgaaccagggagacagaggtcgcagtgagcccaagatcgccccactgcactcaagcctgggcaacagagtgaggctctgtctcaaaaaaaaaaaaaaaagaaagaaagaaagaaaagaaaagaaaaaaagaaaactcactggagaaaataggggggaaaggagttggaggagggagggtagggggtgagcagagaagctgggaggcagagaacaggagcttgatattaggtccttctatctgtctggttgaatcctttagccctactttcttggccttagctgctacattcacgtccctagtcactcacagtccagctgtggtcccagtcagtccggtactgcaccaagtgctccaaacagtggttcaagaatctgttgttccagttcagttctagctgggattcactcagtttgtgaagtgttaggttctctggagcccaggggatcactggagatatgtgtgcatatgtggtcattcccctggcctagacaagtcaggatcctgaaggtagtgcccctaatacctcctcccttcccatcatgatcccctacctcctcttttctgcccatgtacccttatgataaaagaacactactctgtagactccaatgtcccacagtatccctggtctcttgaccctttctttccaaattacccagattctgcagttttagcatctgtgtggcctgtctcctgggttcccgtgggtcctggagctgaacaacaaatgtttggtagaggtggatctcctttttttgcaactgacagccagaagtgatttcttcagagaatagatagtggctgcacttctggactttatcattatccgagttcttgtacctagaggagaaaggttggaaggaagaggaacagtggggccaatctgggtactgcagatatccagagcctagcctcatctcccctcaaccgacttatgacttaccccaggagaaaacagtggggtacctgggagacttgctaccctctctcttggtctctgatccaacccacctcttcttcatcccctccccctcgtcccttctcataccaataatgcagagtgaggttggtaggctggggctcagagctgctgttccaagtgcaattcatgtactcgacattgaacacaaaacactgaacctctgggaggggcagagtggaaacactgagggagtcagtgggcatagtggtcaggaagaaatctagattggggagaaaatgaaggcagggagggaaagagaaatgatggtcagaaggaggaggccaagcacggtggctcatgtctgtaatcctggtgctttgaaaggctgaggcaggaggatcactagaggccaggagtttgagaccagcctaggcaacatagtgagaccctgcctcaaaagaaagaaagaaacaaacaaacaagaaagaaagaaagaagaagtagcgtgaggcagggaaccctcccccttgcccttcccactccacttttcaattctgcccacatgattgtaatggccagtggcaggcaccagatctctgtacggccccttcccacagccacccttctcaccagccccctccagtcccagatttcccaccagctgtggtgtcttcattcccattgggcgtcagaattgtcgtgttcagccccactcccagcaggggcagctgcaggaataagagggatgtgaatggtaatgatggcttcaacatggcgcttgctcttcattccctgggtgtagtctgtctgtgtcaggaacctgggtccctcacccactacccctccccacccacacgtttcctctgtcatagcttccggtggaaagaaccttataaaccagggctttacagagggtgtggcaaatatgtgctgtgtgacacgggctaagtcctctaggagattaggtgctgctgtaaggtggtaaacagaaactaaagctggatatacaatagtgtcacagactcaaaaatcctcagcccacctagatcctgggaaggatctgttcactgcggccgcatgttcttttttttttttttttttttttttcagattcaactaattagaggcatcacctattcgtc

SEQ ID NO: 1071 - DNA, 248 bp, unidentified
  source 1..248: mol_type = other DNA
cacgtgggtgatgcctctaattagttgaatctgatttctcgatcattattattttttggcgatcgcttttttttttttttttagcaaattggtaatactcctgcctccacagttttttttttttttttgcgatcgccttttttttttttttttttttttcagattcaactaattagaggcatcacccacgtgttttttttttttttttttttcagctataggtgatgcctctaattagttgaatctga

SEQ ID NO: 1072 - DNA, 245 bp, unidentified
  source 1..245: mol_type = other DNA
tcagattcaactaattagaggcatcaccagtatgaatttttttttttttttttatcatcggtgatgcctctaattagttgaatctgattttttttttttttttttttttggcgatcgcttttttttttttttttccttctcctctaaatcattaccttctataattttttttttttttttgcgatcgcctttttttttttttgatacattttcagattcaactaattagaggcatcaccgatgat

SEQ ID NO: 1073 - DNA, 4712 bp, unidentified
  source 1..4712: mol_type = other DNA
ttcatactggtgatgcctctaattagttgaatctgattttttttttttttttttttttgaacatgcggccgcgtgaacagatccttcccaggatctaggtgggctgaggatttttgagtctgtgacactattgtatatccagctttagtttctgtttaccaccttacagcagcacctaatctcctagaggacttagcccgtgtcacacagcacatatttgccacaccctctgtaaagccctggtttataaggttctttccaccggaagctatgacagaggaaacgtgtgggtggggaggggtagtgggtgagggacccaggttcctgacacagacagactacacccagggaatgaagagcaagcgccatgttgaagccatcattaccattcacatccctcttattcctgcagctgcccctgctgggagtggggctgaacacgacaattctgacgcccaatgggaatgaagacaccacagctggtgggaaatctgggactggagggggctggtgagaagggtggctgtgggaaggggccgtacagagatctggtgcctgccactggccattacaatcatgtgggcagaattgaaaagtggagtgggaagggcaagggggagggttccctgcctcacgctacttcttctttctttctttcttgtttgtttgtttctttctttcttttgaggcagggtctcactatgttgcctaggctggtctcaaactcctggcctctagtgatcctcctgcctcagcctttcaaagcaccaggattacagacatgagccaccgtgcttggcctcctccttctgaccatcatttctctttccctccctgccttcattttctccccaatctagatttcttcctgaccactatgcccactgactccctcagtgtttccactctgcccctcccagaggttcagtgttttgtgttcaatgtcgagtacatgaattgcacttggaacagcagctctgagccccagcctaccaacctcactctgcattattggtatgagaagggacgagggggaggggatgaagaagaggtgggttggatcagagaccaagagagagggtagcaagtctcccaggtaccccactgttttctcctggggtaagtcataagtcggttgaggggagatgaggctaggctctggatatctgcagtacccagattggccccactgttcctcttccttccaacctttctcctctaggtacaagaactcggataatgataaagtccagaagtgcagccactatctattctctgaagaaatcacttctggctgtcagttgcaaaaaaaggagatccacctctaccaaacatttgttgttcagctccaggacccacgggaacccaggagacaggccacacagatgctaaaactgcagaatctgggtaatttggaaagaaagggtcaagagaccagggatactgtgggacattggagtctacagagtagtgttcttttatcataagggtacatgggcagaaaagaggaggtaggggatcatgatgggaagggaggaggtattaggggcactaccttcaggatcctgacttgtctaggccaggggaatgaccacatatgcacacatatctccagtgatcccctgggctccagagaacctaacacttcacaaactgagtgaatcccagctagaactgaactggaacaacagattcttgaaccactgtttggagcacttggtgcagtaccggactgactgggaccacagctggactgtgagtgactagggacgtgaatgtagcagctaaggccaagaaagtagggctaaaggattcaaccagacagatagaaggacctaatatcaagctcctgttctctgcctcccagcttctctgctcaccccctaccctccctcctccaactcctttcccccctattttctccagtgagttttctttttttcttttcttttctttctttctttcttttttttttttttttgagacagagcctcactctgttgcccaggcttgagtgcagtggggcgatcttgggctcactgcgacctctgtctccctggttcaagtgattctcctgcttcagcctcccaagtagctgggagcatgcacaaccatgcctggctaatttttgtatttttagtaaagacagggttttgccatgttggtcaggctggtcttgaactcctgacctcaggtgatctgcccacctcggcctcccaaagtgctgggattacaggcgtgagccaccattcctgacaccagtgagttttcattagggattccctacccatactcttcctgataccagatagacaagtaaacaaaaggaagccattaaggggatccagaggggaggcattagattcaagtcagtgaagggagcagtgtggcttgagtagtcaagagatgagagagaaactgggcagtagcagagatgacactggtgggtgttcaggagtatgttttaattctcccttctctcatagacacccactttccctcatcctctttctcctcaaggaacaatcagtggattatagacataagttctccttgcctagtgtggatgggcagaaacgctacacgtttcgtgttcggagccgctttaacccactctgtggaagtgctcagcattggagtgaatggagccacccaatccactgggggagcaatacttcaaaaggtaaaatgggcccacatgacccaatccatgagcccaacaccccagcctttctaacaccactgtcttttgctccacttccctgtcactaaagcccctaaacttggtgccccatctctccacactgtctaaccccaacctctagaaatcaaggtttttctgtgtagggttgggttagcgtgttgttagagtaggggagtggattgagaaggaggctgaggggtactcaagggggctatagaatgtataggatttccctgaagcattcctagagagcctgcaaggtgaagatggctttggaaccagctggatctaggctgtgccacatactacctctttggccttggccacatccctaaactcttggattctgtttcctaagatgtaagatggaggtaattgttcctgcctcacaggagctgttgtgaggattaaacagagagtatgtctttagcgcggtgcctggcaccagtgcctggcatgtagtaggggcacaacaaatataaggtccactttgcttttcttttttctatagagaatcctttcctgtttgcattggaagccgtggttatctctgttggctccatgggattgattatcagccttctctgtgtgtatttctggctggaacggtgagatttggagaagcccagaaaaatgaggggaacggtagctgacaatagcagaggagggttttgcagggtctttaggagtaaaggatgagacagtaagtaatgagagattacccaagagggtttggtgatggaaggaagccacaggcacagagaacacagaatcactttatttcatatgggacaactgggagaagggtgataaaaaagctttaacctatgtgctcctgctccctctttctcccctgtcaggacgatgccccgaattcccaccctgaagaacctagaggatcttgttactgaataccacgggaacttttcggtgagaacgctgtcataagcatgctgcagtctatcaactgccaactgcctgccagcaagacagacagagtgtgggggtgggggcagagaggagagggaaggaggccctgcactaactgtcaggatgtggccgaccaaatggggcatggactatacagagagagacacacacagaagtgcagattatagattgaatgaggcagatggcaactggtattgggggcccaggagcctgtgtatcccttctgtaatcaattacagtggttgcagacatcatgagtactcctttggcacagagctcggtcttttacttcctgcccctaattgacccctgacctggacatatctgtctttaggcctggagtggtgtgtctaagggactggctgagagtctgcagccagactacagtgaacgactctgcctcgtcagtgagattcccccaaaaggaggggcccttggggaggggcctggggcctccccatgcaaccagcatagcccctactgggcccccccatgttacaccctaaagcctgaaacctgaaccccaatcctctgacagaagaaccccagggtcctgtagccctaagtggtactaactttccttcattcaacccacctgcgtctcatactcacctcaccccactgtggctgatttggaattttgtgcccccatgtaagcaccccttcatttggcattccccacttgagaattacccttttgccccgaacatgtttttcttctccctcagtctggcccttccttttcgcaggattcttcctccctccctctttccctcccttcctctttccatctaccctccgattgttcctgaaccgatgagaaataaagtttctgttgataatcatcaaaaatgtctgtcatgggggtggggagcaggggaagcctgggatgcaatgagggtgggaggggaagaaaaaggagtagtacattcatgctgtggaggcatctaaaaaaataaaaaaaataaaaaaagcattattgactgatgcatgtaaccttttttttttttttttttttttttcagattcaactaattagaggcatcacctatagctg

SEQ ID NO: 1074 - DNA, 239 bp, unidentified
  source 1..239: mol_type = other DNA
ggtgatgcctctaattagttgaatctgagtagtgtatttttttttttttttttatcatctcagattcaactaattagaggcatcaccttttttttttttttttttttttgcgaccttttttttttttttttgctagaaagagtactgttctggaaactgacttttttttttttttttggtcgctttttttttttttgatacatttggtgatgcctctaattagttgaatctgagatgat

SEQ ID NO: 1075 - DNA, 241 bp, unidentified
  source 1..241: mol_type = other DNA
cacgtgtcagattcaactaattagaggcatcacctttctcgatcattattattttttgcgaccttttttttttttttttgttgagaatggtgctagtggtagtgaacagtttttttttttttttggtcgctttttttttttttttttttttggtgatgcctctaattagttgaatctgacacgtgttttttttttttttttttttgacgaatatcagattcaactaattagaggcatcacc

SEQ ID NO: 1076 - DNA, 4713 bp, unidentified; identical to SEQ ID NO: 1064
  source 1..4713: mol_type = other DNA

SEQ ID NO: 1077 - DNA, 242 bp, unidentified
  source 1..242: mol_type = other DNA
cacgtgtcagattcaactaattagaggcatcacctttctcgatcattattattttttgcgaccttttttttttttttttagcaaattggtaatactcctgcctccacagttttttttttttttttggtcgctttttttttttttttttttttggtgatgcctctaattagttgaatctgacacgtgttttttttttttttttttttcagctatatcagattcaactaattagaggcatcacc

SEQ ID NO: 1078 - DNA, 239 bp, unidentified
  source 1..239: mol_type = other DNA
ggtgatgcctctaattagttgaatctgaagtatgaatttttttttttttttttatcatctcagattcaactaattagaggcatcaccttttttttttttttttttttttgcgaccttttttttttttttttccttctcctctaaatcattaccttctataattttttttttttttttggtcgctttttttttttttgatacatttggtgatgcctctaattagttgaatctgagatgat

SEQ ID NO: 1079 - DNA, 4712 bp, unidentified; identical to SEQ ID NO: 1067
  source 1..4712: mol_type = other DNA

SEQ ID NO: 1080 - DNA, 239 bp, unidentified
  source 1..239: mol_type = other DNA
tcagattcaactaattagaggcatcaccgtagtgtatttttttttttttttttatcatcggtgatgcctctaattagttgaatctgattttttttttttttttttttttgcgaccttttttttttttttttgctagaaagagtactgttctggaaactgacttttttttttttttttggtcgctttttttttttttgatacattttcagattcaactaattagaggcatcaccgatgat

SEQ ID NO: 1081 - DNA, 242 bp, unidentified
  source 1..242: mol_type = other DNA
cacgtgggtgatgcctctaattagttgaatctgatttctcgatcattattattttttgcgaccttttttttttttttttgttgagaatggtgctagtggtagtgaacagttttttttttttttttggtcgcttttttttttttttttttttttcagattcaactaattagaggcatcacccacgtgttttttttttttttttttttgacgaataggtgatgcctctaattagttgaatctga

SEQ ID NO: 1082 - DNA, 4713 bp, unidentified; identical to SEQ ID NO: 1070
  source 1..4713: mol_type = other DNA

SEQ ID NO: 1083 - DNA, 242 bp, unidentified
  source 1..242: mol_type = other DNA
cacgtgggtgatgcctctaattagttgaatctgatttctcgatcattattattttttgcgaccttttttttttttttttagcaaattggtaatactcctgcctccacagttttttttttttttttggtcgcttttttttttttttttttttttcagattcaactaattagaggcatcacccacgtgttttttttttttttttttttcagctataggtgatgcctctaattagttgaatctga

SEQ ID NO: 1084 - DNA, 239 bp, unidentified
  source 1..239: mol_type = other DNA
tcagattcaactaattagaggcatcaccagtatgaatttttttttttttttttatcatcggtgatgcctctaattagttgaatctgattttttttttttttttttttttgcgaccttttttttttttttttccttctcctctaaatcattaccttctataattttttttttttttttggtcgctttttttttttttgatacattttcagattcaactaattagaggcatcaccgatgat

SEQ ID NO: 1085 - DNA, 4712 bp, unidentified; identical to SEQ ID NO: 1073
  source 1..4712: mol_type = other DNA

SEQ ID NO: 1086 - DNA, 251 bp, unidentified
  source 1..251: mol_type = other DNA
ggtgatgcctctaattagttgaatctgagtagtgtatttttttttttttttttatcatctcagattcaactaattagaggcatcaccttttttttttttttttttttttgcggcgatcggcttttttttttttttttgctagaaagagtactgttctggaaactgacttttttttttttttttgccgatcgccgctttttttttttttgatacatttggtgatgcctctaattagttgaatctgagatgat

SEQ ID NO: 1087 - DNA, 254 bp, unidentified
  source 1..254: mol_type = other DNA
cacgtgtcagattcaactaattagaggcatcacctttctcgatcattattattttttgcggcgatcggcttttttttttttttttgttgagaatggtgctagtggtagtgaacagttttttttttttttttgccgatcgccgctttttttttttttttttttttggtgatgcctctaattagttgaatctgacacgtgttttttttttttttttttttgacgaatatcagattcaactaattagaggcatcacc

SEQ ID NO: 1088 - DNA, 4713 bp, unidentified; identical to SEQ ID NO: 1064
  source 1..4713: mol_type = other DNA

SEQ ID NO: 1089 - DNA, 254 bp, unidentified
  source 1..254: mol_type = other DNA
cacgtgtcagattcaactaattagaggcatcacctttctcgatcattattattttttgcggcgatcggcttttttttttttttttagcaaattggtaatactcctgcctccacagttttttttttttttttgccgatcgccgctttttttttttttttttttttggtgatgcctctaattagttgaatctgacacgtgttttttttttttttttttttcagctatatcagattcaactaattagaggcatcacc

SEQ ID NO: 1090 - DNA, 251 bp, unidentified
  source 1..251: mol_type = other DNA
ggtgatgcctctaattagttgaatctgaagtatgaatttttttttttttttttatcatctcagattcaactaattagaggcatcaccttttttttttttttttttttttgcggcgatcggcttttttttttttttttccttctcctctaaatcattaccttctataattttttttttttttttgccgatcgccgctttttttttttttgatacatttggtgatgcctctaattagttgaatctgagatgat

SEQ ID NO: 1091 - DNA, 4712 bp, unidentified; identical to SEQ ID NO: 1067
  source 1..4712: mol_type = other DNA

SEQ ID NO: 1092 - DNA, 251 bp, unidentified
  source 1..251: mol_type = other DNA
tcagattcaactaattagaggcatcaccgtagtgtatttttttttttttttttatcatcggtgatgcctctaattagttgaatctgattttttttttttttttttttttgcggcgatcggcttttttttttttttttgctagaaagagtactgttctggaaactgacttttttttttttttttgccgatcgccgctttttttttttttgatacattttcagattcaactaattagaggcatcaccgatgat

SEQ ID NO: 1093 - DNA, 254 bp, unidentified
  source 1..254: mol_type = other DNA
cacgtgggtgatgcctctaattagttgaatctgatttctcgatcattattattttttgcggcgatcggcttttttttttttttttgttgagaatggtgctagtggtagtgaacagttttttttttttttttgccgatcgccgcttttttttttttttttttttttcagattcaactaattagaggcatcacccacgtgttttttttttttttttttttgacgaataggtgatgcctctaattagttgaatctga

SEQ ID NO: 1094 - DNA, 4713 bp, unidentified; identical to SEQ ID NO: 1070
  source 1..4713: mol_type = other DNA

SEQ ID NO: 1095 - DNA, 254 bp, unidentified
  source 1..254: mol_type = other DNA
cacgtgggtgatgcctctaattagttgaatctgatttctcgatcattattattttttgcggcgatcggcttttttttttttttttagcaaattggtaatactcctgcctccacagttttttttttttttttgccgatcgccgcttttttttttttttttttttttcagattcaactaattagaggcatcacccacgtgttttttttttttttttttttcagctataggtgatgcctctaattagttgaatctga

SEQ ID NO: 1096 - DNA, 251 bp, unidentified
  source 1..251: mol_type = other DNA
tcagattcaactaattagaggcatcaccagtatgaatttttttttttttttttatcatcggtgatgcctctaattagttgaatctgattttttttttttttttttttttgcggcgatcggcttttttttttttttttccttctcctctaaatcattaccttctataattttttttttttttttgccgatcgccgctttttttttttttgatacattttcagattcaactaattagaggcatcaccgatgat

SEQ ID NO: 1097 - DNA, 4712 bp, unidentified; identical to SEQ ID NO: 1073
  source 1..4712: mol_type = other DNA

SEQ ID NO: 1098 - DNA, 245 bp, unidentified
  source 1..245: mol_type = other DNA
ggtgatgcttccaattagtagaacatgtgtagtgtatttttttttttttttttatcatcacatgttctactaattggaagcatcaccttttttttttttttttttttttggcgatcgcttttttttttttttttgctagaaagagtactgttctggaaactgacttttttttttttttttgcgatcgcctttttttttttttgatacatttggtgatgcttccaattagtagaacatgtgatgat

SEQ ID NO: 1099 - DNA, 248 bp, unidentified
  source 1..248: mol_type = other DNA
cacgtgacatgttctactaattggaagcatcacctttctcgatcattattattttttggcgatcgcttttttttttttttttgttgagaatggtgctagtggtagtgaacagttttttttttttttttgcgatcgcctttttttttttttttttttttggtgatgcttccaattagtagaacatgtcacgtgttttttttttttttttttttgacgaataacatgttctactaattggaagcatcacc

SEQ ID NO: 1100 - DNA, 4713 bp, unidentified
  source 1..4713: mol_type = other DNA
tacactacacatgttctactaattggaagcatcaccttttttttttttttttttttttggttacatgcatcagtcaataatgctttttttattttttttatttttttagatgcctccacagcatgaatgtactactcctttttcttcccctcccaccctcattgcatcccaggcttcccctgctccccacccccatgacagacatttttgatgattatcaacagaaactttatttctcatcggttcaggaacaatcggagggtagatggaaagaggaagggagggaaagagggagggaggaagaatcctgcgaaaaggaagggccagactgagggagaagaaaaacatgttcggggcaaaagggtaattctcaagtggggaatgccaaatgaaggggtgcttacatgggggcacaaaattccaaatcagccacagtggggtgaggtgagtatgagacgcaggtgggttgaatgaaggaaagttagtaccacttagggctacaggaccctggggttcttctgtcagaggattggggttcaggtttcaggctttagggtgtaacatgggggggcccagtaggggctatgctggttgcatggggaggccccaggcccctccccaagggcccctccttttgggggaatctcactgacgaggcagagtcgttcactgtagtctggctgcagactctcagccagtcccttagacacaccactccaggcctaaagacagatatgtccaggtcaggggtcaattaggggcaggaagtaaaagaccgagctctgtgccaaaggagtactcatgatgtctgcaaccactgtaattgattacagaagggatacacaggctcctgggcccccaataccagttgccatctgcctcattcaatctataatctgcacttctgtgtgtgtctctctctgtatagtccatgccccatttggtcggccacatcctgacagttagtgcagggcctccttccctctcctctctgcccccacccccacactctgtctgtcttgctggcaggcagttggcagttgatagactgcagcatgcttatgacagcgttctcaccgaaaagttcccgtggtattcagtaacaagatcctctaggttcttcagggtgggaattcggggcatcgtcctgacaggggagaaagagggagcaggagcacataggttaaagcttttttatcacccttctcccagttgtcccatatgaaataaagtgattctgtgttctctgtgcctgtggcttccttccatcaccaaaccctcttgggtaatctctcattacttactgtctcatcctttactcctaaagaccctgcaaaaccctcctctgctattgtcagctaccgttcccctcatttttctgggcttctccaaatctcaccgttccagccagaaatacacacagagaaggctgataatcaatcccatggagccaacagagataaccacggcttccaatgcaaacaggaaaggattctctatagaaaaaagaaaagcaaagtggaccttatatttgttgtgcccctactacatgccaggcactggtgccaggcaccgcgctaaagacatactctctgtttaatcctcacaacagctcctgtgaggcaggaacaattacctccatcttacatcttaggaaacagaatccaagagtttagggatgtggccaaggccaaagaggtagtatgtggcacagcctagatccagctggttccaaagccatcttcaccttgcaggctctctaggaatgcttcagggaaatcctatacattctatagcccccttgagtacccctcagcctccttctcaatccactcccctactctaacaacacgctaacccaaccctacacagaaaaaccttgatttctagaggttggggttagacagtgtggagagatggggcaccaagtttaggggctttagtgacagggaagtggagcaaaagacagtggtgttagaaaggctggggtgttgggctcatggattgggtcatgtgggcccattttaccttttgaagtattgctcccccagtggattgggtggctccattcactccaatgctgagcacttccacagagtgggttaaagcggctccgaacacgaaacgtgtagcgtttctgcccatccacactaggcaaggagaacttatgtctataatccactgattgttccttgaggagaaagaggatgagggaaagtgggtgtctatgagagaagggagaattaaaacatactcctgaacacccaccagtgtcatctctgctactgcccagtttctctctcatctcttgactactcaagccacactgctcccttcactgacttgaatctaatgcctcccctctggatccccttaatggcttccttttgtttacttgtctatctggtatcaggaagagtatgggtagggaatccctaatgaaaactcactggtgtcaggaatggtggctcacgcctgtaatcccagcactttgggaggccgaggtgggcagatcacctgaggtcaggagttcaagaccagcctgaccaacatggcaaaaccctgtctttactaaaaatacaaaaattagccaggcatggttgtgcatgctcccagctacttgggaggctgaagcaggagaatcacttgaaccagggagacagaggtcgcagtgagcccaagatcgccccactgcactcaagcctgggcaacagagtgaggctctgtctcaaaaaaaaaaaaaaaagaaagaaagaaagaaaagaaaagaaaaaaagaaaactcactggagaaaataggggggaaaggagttggaggagggagggtagggggtgagcagagaagctgggaggcagagaacaggagcttgatattaggtccttctatctgtctggttgaatcctttagccctactttcttggccttagctgctacattcacgtccctagtcactcacagtccagctgtggtcccagtcagtccggtactgcaccaagtgctccaaacagtggttcaagaatctgttgttccagttcagttctagctgggattcactcagtttgtgaagtgttaggttctctggagcccaggggatcactggagatatgtgtgcatatgtggtcattcccctggcctagacaagtcaggatcctgaaggtagtgcccctaatacctcctcccttcccatcatgatcccctacctcctcttttctgcccatgtacccttatgataaaagaacactactctgtagactccaatgtcccacagtatccctggtctcttgaccctttctttccaaattacccagattctgcagttttagcatctgtgtggcctgtctcctgggttcccgtgggtcctggagctgaacaacaaatgtttggtagaggtggatctcctttttttgcaactgacagccagaagtgatttcttcagagaatagatagtggctgcacttctggactttatcattatccgagttcttgtacctagaggagaaaggttggaaggaagaggaacagtggggccaatctgggtactgcagatatccagagcctagcctcatctcccctcaaccgacttatgacttaccccaggagaaaacagtggggtacctgggagacttgctaccctctctcttggtctctgatccaacccacctcttcttcatcccctccccctcgtcccttctcataccaataatgcagagtgaggttggtaggctggggctcagagctgctgttccaagtgcaattcatgtactcgacattgaacacaaaacactgaacctctgggaggggcagagtggaaacactgagggagtcagtgggcatagtggtcaggaagaaatctagattggggagaaaatgaaggcagggagggaaagagaaatgatggtcagaaggaggaggccaagcacggtggctcatgtctgtaatcctggtgctttgaaaggctgaggcaggaggatcactagaggccaggagtttgagaccagcctaggcaacatagtgagaccctgcctcaaaagaaagaaagaaacaaacaaacaagaaagaaagaaagaagaagtagcgtgaggcagggaaccctcccccttgcccttcccactccacttttcaattctgcccacatgattgtaatggccagtggcaggcaccagatctctgtacggccccttcccacagccacccttctcaccagccccctccagtcccagatttcccaccagctgtggtgtcttcattcccattgggcgtcagaattgtcgtgttcagccccactcccagcaggggcagctgcaggaataagagggatgtgaatggtaatgatggcttcaacatggcgcttgctcttcattccctgggtgtagtctgtctgtgtcaggaacctgggtccctcacccactacccctccccacccacacgtttcctctgtcatagcttccggtggaaagaaccttataaaccagggctttacagagggtgtggcaaatatgtgctgtgtgacacgggctaagtcctctaggagattaggtgctgctgtaaggtggtaaacagaaactaaagctggatatacaatagtgtcacagactcaaaaatcctcagcccacctagatcctgggaaggatctgttcactgcggccgcatgttctttttttttttttttttttttttggtgatgcttccaattagtagaacatgttattcgtc

SEQ ID NO: 1101 - DNA, 248 bp, unidentified
  source 1..248: mol_type = other DNA
cacgtgacatgttctactaattggaagcatcacctttctcgatcattattattttttggcgatcgcttttttttttttttttagcaaattggtaatactcctgcctccacagttttttttttttttttgcgatcgcctttttttttttttttttttttggtgatgcttccaattagtagaacatgtcacgtgttttttttttttttttttttcagctataacatgttctactaattggaagcatcacc

SEQ ID NO: 1102 - DNA, 245 bp, unidentified
  source 1..245: mol_type = other DNA
ggtgatgcttccaattagtagaacatgtagtatgaatttttttttttttttttatcatcacatgttctactaattggaagcatcaccttttttttttttttttttttttggcgatcgcttttttttttttttttccttctcctctaaatcattaccttctataattttttttttttttttgcgatcgcctttttttttttttgatacatttggtgatgcttccaattagtagaacatgtgatgat

SEQ ID NO: 1103 - DNA, 4712 bp, unidentified
  source 1..4712: mol_type = other DNA
ttcatactacatgttctactaattggaagcatcaccttttttttttttttttttttttgaacatgcggccgcgtgaacagatccttcccaggatctaggtgggctgaggatttttgagtctgtgacactattgtatatccagctttagtttctgtttaccaccttacagcagcacctaatctcctagaggacttagcccgtgtcacacagcacatatttgccacaccctctgtaaagccctggtttataaggttctttccaccggaagctatgacagaggaaacgtgtgggtggggaggggtagtgggtgagggacccaggttcctgacacagacagactacacccagggaatgaagagcaagcgccatgttgaagccatcattaccattcacatccctcttattcctgcagctgcccctgctgggagtggggctgaacacgacaattctgacgcccaatgggaatgaagacaccacagctggtgggaaatctgggactggagggggctggtgagaagggtggctgtgggaaggggccgtacagagatctggtgcctgccactggccattacaatcatgtgggcagaattgaaaagtggagtgggaagggcaagggggagggttccctgcctcacgctacttcttctttctttctttcttgtttgtttgtttctttctttcttttgaggcagggtctcactatgttgcctaggctggtctcaaactcctggcctctagtgatcctcctgcctcagcctttcaaagcaccaggattacagacatgagccaccgtgcttggcctcctccttctgaccatcatttctctttccctccctgccttcattttctccccaatctagatttcttcctgaccactatgcccactgactccctcagtgtttccactctgcccctcccagaggttcagtgttttgtgttcaatgtcgagtacatgaattgcacttggaacagcagctctgagccccagcctaccaacctcactctgcattattggtatgagaagggacgagggggaggggatgaagaagaggtgggttggatcagagaccaagagagagggtagcaagtctcccaggtaccccactgttttctcctggggtaagtcataagtcggttgaggggagatgaggctaggctctggatatctgcagtacccagattggccccactgttcctcttccttccaacctttctcctctaggtacaagaactcggataatgataaagtccagaagtgcagccactatctattctctgaagaaatcacttctggctgtcagttgcaaaaaaaggagatccacctctaccaaacatttgttgttcagctccaggacccacgggaacccaggagacaggccacacagatgctaaaactgcagaatctgggtaatttggaaagaaagggtcaagagaccagggatactgtgggacattggagtctacagagtagtgttcttttatcataagggtacatgggcagaaaagaggaggtaggggatcatgatgggaagggaggaggtattaggggcactaccttcaggatcctgacttgtctaggccaggggaatgaccacatatgcacacatatctccagtgatcccctgggctccagagaacctaacacttcacaaactgagtgaatcccagctagaactgaactggaacaacagattcttgaaccactgtttggagcacttggtgcagtaccggactgactgggaccacagctggactgtgagtgactagggacgtgaatgtagcagctaaggccaagaaagtagggctaaaggattcaaccagacagatagaaggacctaatatcaagctcctgttctctgcctcccagcttctctgctcaccccctaccctccctcctccaactcctttcccccctattttctccagtgagttttctttttttcttttcttttctttctttctttcttttttttttttttttgagacagagcctcactctgttgcccaggcttgagtgcagtggggcgatcttgggctcactgcgacctctgtctccctggttcaagtgattctcctgcttcagcctcccaagtagctgggagcatgcacaaccatgcctggctaatttttgtatttttagtaaagacagggttttgccatgttggtcaggctggtcttgaactcctgacctcaggtgatctgcccacctcggcctcccaaagtgctgggattacaggcgtgagccaccattcctgacaccagtgagttttcattagggattccctacccatactcttcctgataccagatagacaagtaaacaaaaggaagccattaaggggatccagaggggaggcattagattcaagtcagtgaagggagcagtgtggcttgagtagtcaagagatgagagagaaactgggcagtagcagagatgacactggtgggtgttcaggagtatgttttaattctcccttctctcatagacacccactttccctcatcctctttctcctcaaggaacaatcagtggattatagacataagttctccttgcctagtgtggatgggcagaaacgctacacgtttcgtgttcggagccgctttaacccactctgtggaagtgctcagcattggagtgaatggagccacccaatccactgggggagcaatacttcaaaaggtaaaatgggcccacatgacccaatccatgagcccaacaccccagcctttctaacaccactgtcttttgctccacttccctgtcactaaagcccctaaacttggtgccccatctctccacactgtctaaccccaacctctagaaatcaaggtttttctgtgtagggttgggttagcgtgttgttagagtaggggagtggattgagaaggaggctgaggggtactcaagggggctatagaatgtataggatttccctgaagcattcctagagagcctgcaaggtgaagatggctttggaaccagctggatctaggctgtgccacatactacctctttggccttggccacatccctaaactcttggattctgtttcctaagatgtaagatggaggtaattgttcctgcctcacaggagctgttgtgaggattaaacagagagtatgtctttagcgcggtgcctggcaccagtgcctggcatgtagtaggggcacaacaaatataaggtccactttgcttttcttttttctatagagaatcctttcctgtttgcattggaagccgtggttatctctgttggctccatgggattgattatcagccttctctgtgtgtatttctggctggaacggtgagatttggagaagcccagaaaaatgaggggaacggtagctgacaatagcagaggagggttttgcagggtctttaggagtaaaggatgagacagtaagtaatgagagattacccaagagggtttggtgatggaaggaagccacaggcacagagaacacagaatcactttatttcatatgggacaactgggagaagggtgataaaaaagctttaacctatgtgctcctgctccctctttctcccctgtcaggacgatgccccgaattcccaccctgaagaacctagaggatcttgttactgaataccacgggaacttttcggtgagaacgctgtcataagcatgctgcagtctatcaactgccaactgcctgccagcaagacagacagagtgtgggggtgggggcagagaggagagggaaggaggccctgcactaactgtcaggatgtggccgaccaaatggggcatggactatacagagagagacacacacagaagtgcagattatagattgaatgaggcagatggcaactggtattgggggcccaggagcctgtgtatcccttctgtaatcaattacagtggttgcagacatcatgagtactcctttggcacagagctcggtcttttacttcctgcccctaattgacccctgacctggacatatctgtctttaggcctggagtggtgtgtctaagggactggctgagagtctgcagccagactacagtgaacgactctgcctcgtcagtgagattcccccaaaaggaggggcccttggggaggggcctggggcctccccatgcaaccagcatagcccctactgggcccccccatgttacaccctaaagcctgaaacctgaaccccaatcctctgacagaagaaccccagggtcctgtagccctaagtggtactaactttccttcattcaacccacctgcgtctcatactcacctcaccccactgtggctgatttggaattttgtgcccccatgtaagcaccccttcatttggcattccccacttgagaattacccttttgccccgaacatgtttttcttctccctcagtctggcccttccttttcgcaggattcttcctccctccctctttccctcccttcctctttccatctaccctccgattgttcctgaaccgatgagaaataaagtttctgttgataatcatcaaaaatgtctgtcatgggggtggggagcaggggaagcctgggatgcaatgagggtgggaggggaagaaaaaggagtagtacattcatgctgtggaggcatctaaaaaaataaaaaaaataaaaaaagcattattgactgatgcatgtaacctttttttttttttttttttttttggtgatgcttccaattagtagaacatgttatagctg

SEQ ID NO: 1104 - DNA, 245 bp, unidentified
  source 1..245: mol_type = other DNA
acatgttctactaattggaagcatcaccgtagtgtatttttttttttttttttatcatcggtgatgcttccaattagtagaacatgtttttttttttttttttttttttggcgatcgcttttttttttttttttgctagaaagagtactgttctggaaactgacttttttttttttttttgcgatcgcctttttttttttttgatacatttacatgttctactaattggaagcatcaccgatgat

SEQ ID NO: 1105 - DNA, 248 bp, unidentified
  source 1..248: mol_type = other DNA
cacgtgggtgatgcttccaattagtagaacatgttttctcgatcattattattttttggcgatcgcttttttttttttttttgttgagaatggtgctagtggtagtgaacagttttttttttttttttgcgatcgcctttttttttttttttttttttacatgttctactaattggaagcatcacccacgtgttttttttttttttttttttgacgaataggtgatgcttccaattagtagaacatgt

SEQ ID NO: 1106 - DNA, 4713 bp, unidentified
  source 1..4713: mol_type = other DNA
tacactacggtgatgcttccaattagtagaacatgtttttttttttttttttttttttggttacatgcatcagtcaataatgctttttttattttttttatttttttagatgcctccacagcatgaatgtactactcctttttcttcccctcccaccctcattgcatcccaggcttcccctgctccccacccccatgacagacatttttgatgattatcaacagaaactttatttctcatcggttcaggaacaatcggagggtagatggaaagaggaagggagggaaagagggagggaggaagaatcctgcgaaaaggaagggccagactgagggagaagaaaaacatgttcggggcaaaagggtaattctcaagtggggaatgccaaatgaaggggtgcttacatgggggcacaaaattccaaatcagccacagtggggtgaggtgagtatgagacgcaggtgggttgaatgaaggaaagttagtaccacttagggctacaggaccctggggttcttctgtcagaggattggggttcaggtttcaggctttagggtgtaacatgggggggcccagtaggggctatgctggttgcatggggaggccccaggcccctccccaagggcccctccttttgggggaatctcactgacgaggcagagtcgttcactgtagtctggctgcagactctcagccagtcccttagacacaccactccaggcctaaagacagatatgtccaggtcaggggtcaattaggggcaggaagtaaaagaccgagctctgtgccaaaggagtactcatgatgtctgcaaccactgtaattgattacagaagggatacacaggctcctgggcccccaataccagttgccatctgcctcattcaatctataatctgcacttctgtgtgtgtctctctctgtatagtccatgccccatttggtcggccacatcctgacagttagtgcagggcctccttccctctcctctctgcccccacccccacactctgtctgtcttgctggcaggcagttggcagttgatagactgcagcatgcttatgacagcgttctcaccgaaaagttcccgtggtattcagtaacaagatcctctaggttcttcagggtgggaattcggggcatcgtcctgacaggggagaaagagggagcaggagcacataggttaaagcttttttatcacccttctcccagttgtcccatatgaaataaagtgattctgtgttctctgtgcctgtggcttccttccatcaccaaaccctcttgggtaatctctcattacttactgtctcatcctttactcctaaagaccctgcaaaaccctcctctgctattgtcagctaccgttcccctcatttttctgggcttctccaaatctcaccgttccagccagaaatacacacagagaaggctgataatcaatcccatggagccaacagagataaccacggcttccaatgcaaacaggaaaggattctctatagaaaaaagaaaagcaaagtggaccttatatttgttgtgcccctactacatgccaggcactggtgccaggcaccgcgctaaagacatactctctgtttaatcctcacaacagctcctgtgaggcaggaacaattacctccatcttacatcttaggaaacagaatccaagagtttagggatgtggccaaggccaaagaggtagtatgtggcacagcctagatccagctggttccaaagccatcttcaccttgcaggctctctaggaatgcttcagggaaatcctatacattctatagcccccttgagtacccctcagcctccttctcaatccactcccctactctaacaacacgctaacccaaccctacacagaaaaaccttgatttctagaggttggggttagacagtgtggagagatggggcaccaagtttaggggctttagtgacagggaagtggagcaaaagacagtggtgttagaaaggctggggtgttgggctcatggattgggtcatgtgggcccattttaccttttgaagtattgctcccccagtggattgggtggctccattcactccaatgctgagcacttccacagagtgggttaaagcggctccgaacacgaaacgtgtagcgtttctgcccatccacactaggcaaggagaacttatgtctataatccactgattgttccttgaggagaaagaggatgagggaaagtgggtgtctatgagagaagggagaattaaaacatactcctgaacacccaccagtgtcatctctgctactgcccagtttctctctcatctcttgactactcaagccacactgctcccttcactgacttgaatctaatgcctcccctctggatccccttaatggcttccttttgtttacttgtctatctggtatcaggaagagtatgggtagggaatccctaatgaaaactcactggtgtcaggaatggtggctcacgcctgtaatcccagcactttgggaggccgaggtgggcagatcacctgaggtcaggagttcaagaccagcctgaccaacatggcaaaaccctgtctttactaaaaatacaaaaattagccaggcatggttgtgcatgctcccagctacttgggaggctgaagcaggagaatcacttgaaccagggagacagaggtcgcagtgagcccaagatcgccccactgcactcaagcctgggcaacagagtgaggctctgtctcaaaaaaaaaaaaaaaagaaagaaagaaagaaaagaaaagaaaaaaagaaaactcactggagaaaataggggggaaaggagttggaggagggagggtagggggtgagcagagaagctgggaggcagagaacaggagcttgatattaggtccttctatctgtctggttgaatcctttagccctactttcttggccttagctgctacattcacgtccctagtcactcacagtccagctgtggtcccagtcagtccggtactgcaccaagtgctccaaacagtggttcaagaatctgttgttccagttcagttctagctgggattcactcagtttgtgaagtgttaggttctctggagcccaggggatcactggagatatgtgtgcatatgtggtcattcccctggcctagacaagtcaggatcctgaaggtagtgcccctaatacctcctcccttcccatcatgatcccctacctcctcttttctgcccatgtacccttatgataaaagaacactactctgtagactccaatgtcccacagtatccctggtctcttgaccctttctttccaaattacccagattctgcagttttagcatctgtgtggcctgtctcctgggttcccgtgggtcctggagctgaacaacaaatgtttggtagaggtggatctcctttttttgcaactgacagccagaagtgatttcttcagagaatagatagtggctgcacttctggactttatcattatccgagttcttgtacctagaggagaaaggttggaaggaagaggaacagtggggccaatctgggtactgcagatatccagagcctagcctcatctcccctcaaccgacttatgacttaccccaggagaaaacagtggggtacctgggagacttgctaccctctctcttggtctctgatccaacccacctcttcttcatcccctccccctcgtcccttctcataccaataatgcagagtgaggttggtaggctggggctcagagctgctgttccaagtgcaattcatgtactcgacattgaacacaaaacactgaacctctgggaggggcagagtggaaacactgagggagtcagtgggcatagtggtcaggaagaaatctagattggggagaaaatgaaggcagggagggaaagagaaatgatggtcagaaggaggaggccaagcacggtggctcatgtctgtaatcctggtgctttgaaaggctgaggcaggaggatcactagaggccaggagtttgagaccagcctaggcaacatagtgagaccctgcctcaaaagaaagaaagaaacaaacaaacaagaaagaaagaaagaagaagtagcgtgaggcagggaaccctcccccttgcccttcccactccacttttcaattctgcccacatgattgtaatggccagtggcaggcaccagatctctgtacggccccttcccacagccacccttctcaccagccccctccagtcccagatttcccaccagctgtggtgtcttcattcccattgggcgtcagaattgtcgtgttcagccccactcccagcaggggcagctgcaggaataagagggatgtgaatggtaatgatggcttcaacatggcgcttgctcttcattccctgggtgtagtctgtctgtgtcaggaacctgggtccctcacccactacccctccccacccacacgtttcctctgtcatagcttccggtggaaagaaccttataaaccagggctttacagagggtgtggcaaatatgtgctgtgtgacacgggctaagtcctctaggagattaggtgctgctgtaaggtggtaaacagaaactaaagctggatatacaatagtgtcacagactcaaaaatcctcagcccacctagatcctgggaaggatctgttcactgcggccgcatgttctttttttttttttttttttttttacatgttctactaattggaagcatcacctattcgtc

SEQ ID NO: 1107 - DNA, 248 bp, unidentified
  source 1..248: mol_type = other DNA
cacgtgggtgatgcttccaattagtagaacatgttttctcgatcattattattttttggcgatcgcttttttttttttttttagcaaattggtaatactcctgcctccacagttttttttttttttttgcgatcgcctttttttttttttttttttttacatgttctactaattggaagcatcacccacgtgttttttttttttttttttttcagctataggtgatgcttccaattagtagaacatgt

SEQ ID NO: 1108 - DNA, 245 bp, unidentified
  source 1..245: mol_type = other DNA
acatgttctactaattggaagcatcaccagtatgaatttttttttttttttttatcatcggtgatgcttccaattagtagaacatgtttttttttttttttttttttttggcgatcgcttttttttttttttttccttctcctctaaatcattaccttctataattttttttttttttttgcgatcgcctttttttttttttgatacatttacatgttctactaattggaagcatcaccgatgat

SEQ ID NO: 1109 - DNA, 4712 bp, unidentified
  source 1..4712: mol_type = other DNA
ttcatactggtgatgcttccaattagtagaacatgtttttttttttttttttttttttgaacatgcggccgcgtgaacagatccttcccaggatctaggtgggctgaggatttttgagtctgtgacactattgtatatccagctttagtttctgtttaccaccttacagcagcacctaatctcctagaggacttagcccgtgtcacacagcacatatttgccacaccctctgtaaagccctggtttataaggttctttccaccggaagctatgacagaggaaacgtgtgggtggggaggggtagtgggtgagggacccaggttcctgacacagacagactacacccagggaatgaagagcaagcgccatgttgaagccatcattaccattcacatccctcttattcctgcagctgcccctgctgggagtggggctgaacacgacaattctgacgcccaatgggaatgaagacaccacagctggtgggaaatctgggactggagggggctggtgagaagggtggctgtgggaaggggccgtacagagatctggtgcctgccactggccattacaatcatgtgggcagaattgaaaagtggagtgggaagggcaagggggagggttccctgcctcacgctacttcttctttctttctttcttgtttgtttgtttctttctttcttttgaggcagggtctcactatgttgcctaggctggtctcaaactcctggcctctagtgatcctcctgcctcagcctttcaaagcaccaggattacagacatgagccaccgtgcttggcctcctccttctgaccatcatttctctttccctccctgccttcattttctccccaatctagatttcttcctgaccactatgcccactgactccctcagtgtttccactctgcccctcccagaggttcagtgttttgtgttcaatgtcgagtacatgaattgcacttggaacagcagctctgagccccagcctaccaacctcactctgcattattggtatgagaagggacgagggggaggggatgaagaagaggtgggttggatcagagaccaagagagagggtagcaagtctcccaggtaccccactgttttctcctggggtaagtcataagtcggttgaggggagatgaggctaggctctggatatctgcagtacccagattggccccactgttcctcttccttccaacctttctcctctaggtacaagaactcggataatgataaagtccagaagtgcagccactatctattctctgaagaaatcacttctggctgtcagttgcaaaaaaaggagatccacctctaccaaacatttgttgttcagctccaggacccacgggaacccaggagacaggccacacagatgctaaaactgcagaatctgggtaatttggaaagaaagggtcaagagaccagggatactgtgggacattggagtctacagagtagtgttcttttatcataagggtacatgggcagaaaagaggaggtaggggatcatgatgggaagggaggaggtattaggggcactaccttcaggatcctgacttgtctaggccaggggaatgaccacatatgcacacatatctccagtgatcccctgggctccagagaacctaacacttcacaaactgagtgaatcccagctagaactgaactggaacaacagattcttgaaccactgtttggagcacttggtgcagtaccggactgactgggaccacagctggactgtgagtgactagggacgtgaatgtagcagctaaggccaagaaagtagggctaaaggattcaaccagacagatagaaggacctaatatcaagctcctgttctctgcctcccagcttctctgctcaccccctaccctccctcctccaactcctttcccccctattttctccagtgagttttctttttttcttttcttttctttctttctttcttttttttttttttttgagacagagcctcactctgttgcccaggcttgagtgcagtggggcgatcttgggctcactgcgacctctgtctccctggttcaagtgattctcctgcttcagcctcccaagtagctgggagcatgcacaaccatgcctggctaatttttgtatttttagtaaagacagggttttgccatgttggtcaggctggtcttgaactcctgacctcaggtgatctgcccacctcggcctcccaaagtgctgggattacaggcgtgagccaccattcctgacaccagtgagttttcattagggattccctacccatactcttcctgataccagatagacaagtaaacaaaaggaagccattaaggggatccagaggggaggcattagattcaagtcagtgaagggagcagtgtggcttgagtagtcaagagatgagagagaaactgggcagtagcagagatgacactggtgggtgttcaggagtatgttttaattctcccttctctcatagacacccactttccctcatcctctttctcctcaaggaacaatcagtggattatagacataagttctccttgcctagtgtggatgggcagaaacgctacacgtttcgtgttcggagccgctttaacccactctgtggaagtgctcagcattggagtgaatggagccacccaatccactgggggagcaatacttcaaaaggtaaaatgggcccacatgacccaatccatgagcccaacaccccagcctttctaacaccactgtcttttgctccacttccctgtcactaaagcccctaaacttggtgccccatctctccacactgtctaaccccaacctctagaaatcaaggtttttctgtgtagggttgggttagcgtgttgttagagtaggggagtggattgagaaggaggctgaggggtactcaagggggctatagaatgtataggatttccctgaagcattcctagagagcctgcaaggtgaagatggctttggaaccagctggatctaggctgtgccacatactacctctttggccttggccacatccctaaactcttggattctgtttcctaagatgtaagatggaggtaattgttcctgcctcacaggagctgttgtgaggattaaacagagagtatgtctttagcgcggtgcctggcaccagtgcctggcatgtagtaggggcacaacaaatataaggtccactttgcttttcttttttctatagagaatcctttcctgtttgcattggaagccgtggttatctctgttggctccatgggattgattatcagccttctctgtgtgtatttctggctggaacggtgagatttggagaagcccagaaaaatgaggggaacggtagctgacaatagcagaggagggttttgcagggtctttaggagtaaaggatgagacagtaagtaatgagagattacccaagagggtttggtgatggaaggaagccacaggcacagagaacacagaatcactttatttcatatgggacaactgggagaagggtgataaaaaagctttaacctatgtgctcctgctccctctttctcccctgtcaggacgatgccccgaattcccaccctgaagaacctagaggatcttgttactgaataccacgggaacttttcggtgagaacgctgtcataagcatgctgcagtctatcaactgccaactgcctgccagcaagacagacagagtgtgggggtgggggcagagaggagagggaaggaggccctgcactaactgtcaggatgtggccgaccaaatggggcatggactatacagagagagacacacacagaagtgcagattatagattgaatgaggcagatggcaactggtattgggggcccaggagcctgtgtatcccttctgtaatcaattacagtggttgcagacatcatgagtactcctttggcacagagctcggtcttttacttcctgcccctaattgacccctgacctggacatatctgtctttaggcctggagtggtgtgtctaagggactggctgagagtctgcagccagactacagtgaacgactctgcctcgtcagtgagattcccccaaaaggaggggcccttggggaggggcctggggcctccccatgcaaccagcatagcccctactgggcccccccatgttacaccctaaagcctgaaacctgaaccccaatcctctgacagaagaaccccagggtcctgtagccctaagtggtactaactttccttcattcaacccacctgcgtctcatactcacctcaccccactgtggctgatttggaattttgtgcccccatgtaagcaccccttcatttggcattccccacttgagaattacccttttgccccgaacatgtttttcttctccctcagtctggcccttccttttcgcaggattcttcctccctccctctttccctcccttcctctttccatctaccctccgattgttcctgaaccgatgagaaataaagtttctgttgataatcatcaaaaatgtctgtcatgggggtggggagcaggggaagcctgggatgcaatgagggtgggaggggaagaaaaaggagtagtacattcatgctgtggaggcatctaaaaaaataaaaaaaataaaaaaagcattattgactgatgcatgtaacctttttttttttttttttttttttacatgttctactaattggaagcatcacctatagctg

SEQ ID NO: 1110 - DNA, 239 bp, unidentified
  source 1..239: mol_type = other DNA
ggtgatgcttccaattagtagaacatgtgtagtgtatttttttttttttttttatcatcacatgttctactaattggaagcatcaccttttttttttttttttttttttgcgaccttttttttttttttttgctagaaagagtactgttctggaaactgacttttttttttttttttggtcgctttttttttttttgatacatttggtgatgcttccaattagtagaacatgtgatgat

SEQ ID NO: 1111 - DNA, 241 bp, unidentified
  source 1..241: mol_type = other DNA
cacgtgacatgttctactaattggaagcatcacctttctcgatcattattattttttgcgaccttttttttttttttttgttgagaatggtgctagtggtagtgaacagtttttttttttttttggtcgctttttttttttttttttttttggtgatgcttccaattagtagaacatgtcacgtgttttttttttttttttttttgacgaataacatgttctactaattggaagcatcacc

SEQ ID NO: 1112 - DNA, 4713 bp, unidentified; identical to SEQ ID NO: 1100
  source 1..4713: mol_type = other DNA

SEQ ID NO: 1113 - DNA, 242 bp, unidentified
  source 1..242: mol_type = other DNA
cacgtgacatgttctactaattggaagcatcacctttctcgatcattattattttttgcgaccttttttttttttttttagcaaattggtaatactcctgcctccacagttttttttttttttttggtcgctttttttttttttttttttttggtgatgcttccaattagtagaacatgtcacgtgttttttttttttttttttttcagctataacatgttctactaattggaagcatcacc

SEQ ID NO: 1114 - DNA, 239 bp, unidentified
  source 1..239: mol_type = other DNA
ggtgatgcttccaattagtagaacatgtagtatgaatttttttttttttttttatcatcacatgttctactaattggaagcatcaccttttttttttttttttttttttgcgaccttttttttttttttttccttctcctctaaatcattaccttctataattttttttttttttttggtcgctttttttttttttgatacatttggtgatgcttccaattagtagaacatgtgatgat

SEQ ID NO: 1115 - DNA, 4712 bp, unidentified; identical to SEQ ID NO: 1103
  source 1..4712: mol_type = other DNA

SEQ ID NO: 1116 - DNA, 239 bp, unidentified
  source 1..239: mol_type = other DNA
acatgttctactaattggaagcatcaccgtagtgtatttttttttttttttttatcatcggtgatgcttccaattagtagaacatgtttttttttttttttttttttttgcgaccttttttttttttttttgctagaaagagtactgttctggaaactgacttttttttttttttttggtcgctttttttttttttgatacatttacatgttctactaattggaagcatcaccgatgat

SEQ ID NO: 1117 - DNA, 242 bp, unidentified
  source 1..242: mol_type = other DNA
cacgtgggtgatgcttccaattagtagaacatgttttctcgatcattattattttttgcgaccttttttttttttttttgttgagaatggtgctagtggtagtgaacagttttttttttttttttggtcgctttttttttttttttttttttacatgttctactaattggaagcatcacccacgtgttttttttttttttttttttgacgaataggtgatgcttccaattagtagaacatgt

SEQ ID NO: 1118 - DNA, 4713 bp, unidentified; identical to SEQ ID NO: 1106
  source 1..4713: mol_type = other DNA

SEQ ID NO: 1119 - DNA, 242 bp, unidentified
  source 1..242: mol_type = other DNA
cacgtgggtgatgcttccaattagtagaacatgttttctcgatcattattattttttgcgaccttttttttttttttttagcaaattggtaatactcctgcctccacagttttttttttttttttggtcgctttttttttttttttttttttacatgttctactaattggaagcatcacccacgtgttttttttttttttttttttcagctataggtgatgcttccaattagtagaacatgt

SEQ ID NO: 1120 - DNA, 239 bp, unidentified
  source 1..239: mol_type = other DNA
acatgttctactaattggaagcatcaccagtatgaatttttttttttttttttatcatcggtgatgcttccaattagtagaacatgtttttttttttttttttttttttgcgaccttttttttttttttttccttctcctctaaatcattaccttctataattttttttttttttttggtcgctttttttttttttgatacatttacatgttctactaattggaagcatcaccgatgat

SEQ ID NO: 1121 - DNA, 4712 bp, unidentified; identical to SEQ ID NO: 1109
  source 1..4712: mol_type = other DNA

SEQ ID NO: 1122 - DNA, 251 bp, unidentified
  source 1..251: mol_type = other DNA
ggtgatgcttccaattagtagaacatgtgtagtgtatttttttttttttttttatcatcacatgttctactaattggaagcatcaccttttttttttttttttttttttgcggcgatcggcttttttttttttttttgctagaaagagtactgttctggaaactgacttttttttttttttttgccgatcgccgctttttttttttttgatacatttggtgatgcttccaattagtagaacatgtgatgat

SEQ ID NO: 1123 - DNA, 254 bp, unidentified
  source 1..254: mol_type = other DNA
cacgtgacatgttctactaattggaagcatcacctttctcgatcattattattttttgcggcgatcggcttttttttttttttttgttgagaatggtgctagtggtagtgaacagttttttttttttttttgccgatcgccgctttttttttttttttttttttggtgatgcttccaattagtagaacatgtcacgtgttttttttttttttttttttgacgaataacatgttctactaattggaagcatcacc

SEQ ID NO: 1124 - DNA, 4713 bp, unidentified; identical to SEQ ID NO: 1100
  source 1..4713: mol_type = other DNA

SEQ ID NO: 1125 - DNA, 254 bp, unidentified
  source 1..254: mol_type = other DNA
cacgtgacatgttctactaattggaagcatcacctttctcgatcattattattttttgcggcgatcggcttttttttttttttttagcaaattggtaatactcctgcctccacagttttttttttttttttgccgatcgccgctttttttttttttttttttttggtgatgcttccaattagtagaacatgtcacgtgttttttttttttttttttttcagctataacatgttctactaattggaagcatcacc

SEQ ID NO: 1126 - DNA, 251 bp, unidentified
  source 1..251: mol_type = other DNA
ggtgatgcttccaattagtagaacatgtagtatgaatttttttttttttttttatcatcacatgttctactaattggaagcatcaccttttttttttttttttttttttgcggcgatcggcttttttttttttttttccttctcctctaaatcattaccttctataattttttttttttttttgccgatcgccgctttttttttttttgatacatttggtgatgcttccaattagtagaacatgtgatgat

SEQ ID NO: 1127 - DNA, 4712 bp, unidentified; identical to SEQ ID NO: 1103
  source 1..4712: mol_type = other DNA

SEQ ID NO: 1128 - DNA, 251 bp, unidentified
  source 1..251: mol_type = other DNA
acatgttctactaattggaagcatcaccgtagtgtatttttttttttttttttatcatcggtgatgcttccaattagtagaacatgtttttttttttttttttttttttgcggcgatcggcttttttttttttttttgctagaaagagtactgttctggaaactgacttttttttttttttttgccgatcgccgctttttttttttttgatacatttacatgttctactaattggaagcatcaccgatgat

SEQ ID NO: 1129 - DNA, 254 bp, unidentified
  source 1..254: mol_type = other DNA
cacgtgggtgatgcttccaattagtagaacatgttttctcgatcattattattttttgcggcgatcggcttttttttttttttttgttgagaatggtgctagtggtagtgaacagttttttttttttttttgccgatcgccgctttttttttttttttttttttacatgttctactaattggaagcatcacccacgtgttttttttttttttttttttgacgaataggtgatgcttccaattagtagaacatgt

SEQ ID NO: 1130 - DNA, 4713 bp, unidentified; identical to SEQ ID NO: 1106
  source 1..4713: mol_type = other DNA

SEQ ID NO: 1131 - DNA, 254 bp, unidentified
  source 1..254: mol_type = other DNA
cacgtgggtgatgcttccaattagtagaacatgttttctcgatcattattattttttgcggcgatcggcttttttttttttttttagcaaattggtaatactcctgcctccacagttttttttttttttttgccgatcgccgctttttttttttttttttttttacatgttctactaattggaagcatcacccacgtgttttttttttttttttttttcagctataggtgatgcttccaattagtagaacatgt

SEQ ID NO: 1132 - DNA, 251 bp, unidentified
  source 1..251: mol_type = other DNA
acatgttctactaattggaagcatcaccagtatgaatttttttttttttttttatcatcggtgatgcttccaattagtagaacatgtttttttttttttttttttttttgcggcgatcggcttttttttttttttttccttctcctctaaatcattaccttctataattttttttttttttttgccgatcgccgctttttttttttttgatacatttacatgttctactaattggaagcatcaccgatgat

SEQ ID NO: 1133 - DNA, 4712 bp, unidentified; identical to SEQ ID NO: 1109
  source 1..4712: mol_type = other DNA

SEQ ID NO: 1134 - DNA, 67 bp, unidentified
  source 1..67: mol_type = other DNA
tacactacctgtctcttatacacatctttttttttttttttttttttttggttacatgcatcgtaca

SEQ ID NO: 1135 - DNA, 68 bp, unidentified
  source 1..68: mol_type = other DNA
tgtacgatgcatgtaacctttttttttttttttttttttttagatgtgtataagagacagtatagctg

SEQ ID NO: 1136 - DNA, 49 bp, unidentified
  source 1..49: mol_type = other DNA
ataataatgatcgagaacttttttttttttttttttttttttttttttt

SEQ ID NO: 1137 - DNA, 70 bp, unidentified
  source 1..70: mol_type = other DNA
cgatacgcggccgcatgttctttttttttttttttttttttttagatgtgtataagagacagtattcgtc

SEQ ID NO: 1138 - DNA, 69 bp, unidentified
  source 1..69: mol_type = other DNA
ttcatactctgtctcttatacacatctttttttttttttttttttttttgaacatgcggccgcgtatcg

SEQ ID NO: 1139 - DNA, 21 bp, unidentified
  source 1..21: mol_type = other DNA
agtgaacagatccttcccagg

SEQ ID NO: 1140 - DNA, 22 bp, unidentified
  source 1..22: mol_type = other DNA
cacgaactccagcaggaccatg
